United States Patent Application Publication US 2022/0040281 A1 - sequence listing, part 5

SEQ ID NO: 8805 - RNA, 1029 nt, Artificial Sequence
  derived and/or modified CDS sequence (opt3) from Pf(3D7)__XP_001351122.1__HsALB_Pf-CSP(19-272)_L(AAY)_Pf-CSP(310-3 27)_L(AAY)_Pf-CSP(346-375)_L(AAY)_PADRE
augaagugggugaccuucaucagccugcucuuucuuuucuccucugccuacucacuguuucaggaguaucaaugcuacggcaguagcuccaacacaagagucuugaaugaauuaaacuaugacaaugcugggacuaaccuguacaaugagcuagaaaugaacuauuacggaaaacaggagaauugguauucucucaagaaaaacucgaggucacugggugaaaaugaugacggcaacaaugaggauaacgagaaacuucggaagcccaagcacaagaaacugaagcagccugcagacgggaauccagauccgaacgccaaucccaacguugacccuaacgcgaauccaaacguggaucccaaugcuaacccuaauguagacccaaacgccaaucccaacgcaaauccuaacgccaauccaaacgcuaauccgaacgcaaaucccaacgccaacccuaaugcuaacccaaaugccaaccccaaugcgaacccuaaugcaaacccaaaugccaaccccaaugcuaacccgaaugccaacccuaaugcaaaccccaacgcuaauccaaacgccaauccuaacgcgaaucccaacguggauccaaaugccaaccccaaugcaaacccuaaugcuaacccaaaugccaacccgaaugcuaaccccaacgccaauccuaacgcaaauccaaacgccaaucccaacgcuaauccuaacgcgaauccaaacgcaaaucccaacgccaauccgaacgcuaauccuaacgccaauccaaacgcaaaccccaaugccaacccuaaugcuaaccccaaugccaacccagcagcguacgaaccuagcgacaaacauauuaaggaguacuugaauaaaauacagaacagucucgcugccuauaucaagcccggauccgcaaauaagccaaaagaugaacuggacuacgccaacgauauugagaagaaaaucuguaagauggagaaaugcucugcugccuaugcaaaguucgucgcugccuggacgcugaaagcggccgcuuga

SEQ ID NO: 8806 - RNA, 1083 nt, Artificial Sequence
  derived and/or modified CDS sequence (opt3) from Pf(3D7)__XP_001351122.1__HsALB_Pf-CSP(19-272)_L(AAY)_Pf-CSP(310-3 27)_L(AAY)_Pf-CSP(346-375)_L(AAY)_PADRE_L(AAY)_P2
augaagugggugaccuucaucagccugcucuuucuuuucuccucugccuacucacuguuucaggaguaucaaugcuacggcaguagcuccaacacaagagucuugaaugaauuaaacuaugacaaugcugggacuaaccuguacaaugagcuagaaaugaacuauuacggaaaacaggagaauugguauucucucaagaaaaacucgaggucacugggugaaaaugaugacggcaacaaugaggauaacgagaaacuucggaagcccaagcacaagaaacugaagcagccugcagacgggaauccagauccgaacgccaaucccaacguugacccuaacgcgaauccaaacguggaucccaaugcuaacccuaauguagacccaaacgccaaucccaacgcaaauccuaacgccaauccaaacgcuaauccgaacgcaaaucccaacgccaacccuaaugcuaacccaaaugccaaccccaaugcgaacccuaaugcaaacccaaaugccaaccccaaugcuaacccgaaugccaacccuaaugcaaaccccaacgcuaauccaaacgccaauccuaacgcgaaucccaacguggauccaaaugccaaccccaaugcaaacccuaaugcuaacccaaaugccaacccgaaugcuaaccccaacgccaauccuaacgcaaauccaaacgccaaucccaacgcuaauccuaacgcgaauccaaacgcaaaucccaacgccaauccgaacgcuaauccuaacgccaauccaaacgcaaaccccaaugccaacccuaaugcuaaccccaaugccaacccagcagcguacgaaccuagcgacaaacauauuaaggaguacuugaauaaaauacagaacagucucgcugccuauaucaagcccggauccgcaaauaagccaaaagaugaacuggacuacgccaacgauauugagaagaaaaucuguaagauggagaaaugcucugcugccuaugcaaaguucgucgcugccuggacgcugaaagcggccgcugcagccuaccaauauauuaaggcuaauagcaaguuuaucggcauaaccgaacucuga

SEQ ID NO: 8807 - RNA, 1047 nt, Artificial Sequence
  derived and/or modified CDS sequence (opt3) from Pf(3D7)__XP_001351122.1__HsALB_Pf-CSP(19-272)_L(AAY)_Pf-CSP(310-3 27)_Linker (AAY)_Pf-CSP(346-397)
augaagugggugaccuucaucagccugcucuuucuuuucuccucugccuacucacuguuucaggaguaucaaugcuacggcaguagcuccaacacaagagucuugaaugaauuaaacuaugacaaugcugggacuaaccuguacaaugagcuagaaaugaacuauuacggaaaacaggagaauugguauucucucaagaaaaacucgaggucacugggugaaaaugaugacggcaacaaugaggauaacgagaaguuacggaaacccaagcacaagaaacugaagcagccugcagacgggaauccagauccgaacgccaaucccaacguugacccuaacgcgaauccaaacguggaucccaaugcuaacccuaauguagacccaaacgccaaucccaacgcaaauccuaacgccaauccaaacgcuaauccgaacgcaaaucccaacgccaacccuaaugcuaacccaaaugccaaccccaaugcgaacccuaaugcaaacccaaaugccaaccccaaugcuaacccgaaugccaacccuaaugcaaaccccaacgcuaauccaaacgccaauccuaacgcgaaucccaacguggauccaaaugccaaccccaaugcaaacccuaaugcuaacccaaaugccaacccgaaugcuaaccccaacgccaauccuaacgcaaauccaaacgccaaucccaacgcuaauccuaacgcgaauccaaacgcaaaucccaacgccaauccgaacgcuaauccuaacgccaauccaaacgcaaaccccaaugccaacccuaaugcuaaccccaaugccaacccagcagcguacgaaccuagcgacaaacauauuaaggaguacuugaauaaaauacagaacagucucgcugccuauaucaagcccggauccgcaaauaagccaaaagaugaacuggacuacgccaacgauauugagaagaaaaucuguaagauggagaaaugcucuagcgucuucaaugugguuaacuccucaauuggccugaucauggugcucaguuuucuuuuccugaauuga

SEQ ID NO: 8808 - RNA, 1647 nt, Artificial Sequence
  derived and/or modified CDS sequence (opt4) from Pf(3D7)__XP_001351122.1__LumSynt_L(GGS4-GGG)_Pf-CSP(19-397)
augcagaucuacgagggcaagcugaccgccgagggccugagauucggcaucguggccagcagauucaaccacgcccugguggacagacugguggagggcgccaucgacgccaucgugagacacggcggcagagaggaggacaucacccuggugagagugcccggcagcugggagauccccguggccgccggcgagcuggccagaaaggaggacaucgacgccgugaucgccaucggcgugcugaucagaggcgccaccccccacuucgacuacaucgccagcgaggugagcaagggccuggccgaccugagccuggagcugagaaagcccaucaccuucggcgugaucaccgccgacacccuggagcaggccaucgagagagccggcaccaagcacggcaacaagggcugggaggccgcccugagcgccaucgagauggccaaccuguucaagagccugagaggcggcagcggcggcagcggcggcagcggcggcagcggcggcggccuguuccaggaguaccagugcuacggcagcagcagcaacaccagagugcugaacgagcugaacuacgacaacgccggcaccaaccuguacaacgagcuggagaugaacuacuacggcaagcaggagaacugguacagccugaagaagaacagcagaagccugggcgagaacgacgacggcaacaacgaggacaacgagaagcugagaaagcccaagcacaagaagcugaagcagcccgccgacggcaaccccgaccccaacgccaaccccaacguggaccccaacgccaaccccaacguggaccccaacgccaaccccaacguggaccccaacgccaaccccaacgccaaccccaacgccaaccccaacgccaaccccaacgccaaccccaacgccaaccccaacgccaaccccaacgccaaccccaacgccaaccccaacgccaaccccaacgccaaccccaacgccaaccccaacgccaaccccaacgccaaccccaacgccaaccccaacgccaaccccaacgccaaccccaacguggaccccaacgccaaccccaacgccaaccccaacgccaaccccaacgccaaccccaacgccaaccccaacgccaaccccaacgccaaccccaacgccaaccccaacgccaaccccaacgccaaccccaacgccaaccccaacgccaaccccaacgccaaccccaacgccaaccccaacgccaaccccaacgccaaccccaacgccaaccccaacgccaaccccaacaagaacaaccagggcaacggccagggccacaacaugcccaacgaccccaacagaaacguggacgagaacgccaacgccaacagcgccgugaagaacaacaacaacgaggagcccagcgacaagcacaucaaggaguaccugaacaagauccagaacagccugagcaccgaguggagccccugcagcgugaccugcggcaacggcauccaggugagaaucaagcccggcagcgccaacaagcccaaggacgagcuggacuacgccaacgacaucgagaagaagaucugcaagauggagaagugcagcagcguguucaacguggugaacagcagcaucggccugaucauggugcugagcuuccuguuccugaacuga

SEQ ID NO: 8809 - RNA, 1509 nt, Artificial Sequence
  derived and/or modified CDS sequence (opt4) from Pf(3D7)__XP_001351122.1__HsALB_Pf-CSP(19-272)_L(PVTN)_HBsAg
augaagugggugaccuucaucagccugcuguuccuguucagcagcgccuacagccuguuccaggaguaccagugcuacggcagcagcagcaacaccagagugcugaacgagcugaacuacgacaacgccggcaccaaccuguacaacgagcuggagaugaacuacuacggcaagcaggagaacugguacagccugaagaagaacagcagaagccugggcgagaacgacgacggcaacaacgaggacaacgagaagcugagaaagcccaagcacaagaagcugaagcagcccgccgacggcaaccccgaccccaacgccaaccccaacguggaccccaacgccaaccccaacguggaccccaacgccaaccccaacguggaccccaacgccaaccccaacgccaaccccaacgccaaccccaacgccaaccccaacgccaaccccaacgccaaccccaacgccaaccccaacgccaaccccaacgccaaccccaacgccaaccccaacgccaaccccaacgccaaccccaacgccaaccccaacgccaaccccaacgccaaccccaacgccaaccccaacgccaaccccaacguggaccccaacgccaaccccaacgccaaccccaacgccaaccccaacgccaaccccaacgccaaccccaacgccaaccccaacgccaaccccaacgccaaccccaacgccaaccccaacgccaaccccaacgccaaccccaacgccaaccccaacgccaaccccaacgccaaccccaacgccaaccccaacgccaaccccaacgccaaccccaacgccaacccccccgugaccaacauggagaacaucaccagcggcuuccugggcccccugcuggugcugcaggccggcuucuuccugcugaccagaauccugaccaucccccagagccuggacagcugguggaccagccugaacuuccugggcggcagccccgugugccugggccagaacagccagagccccaccagcaaccacagccccaccagcugcccccccaucugccccggcuacagauggaugugccugagaagauucaucaucuuccuguucauccugcugcugugccugaucuuccugcuggugcugcuggacuaccagggcaugcugcccgugugcccccugauccccggcagcaccaccaccaacaccggccccugcaagaccugcaccacccccgcccagggcaacagcauguuccccagcugcugcugcaccaagcccaccgacggcaacugcaccugcauccccauccccagcagcugggccuucgccaaguaccugugggagugggccagcgugagauucagcuggcugagccugcuggugcccuucgugcagugguucgugggccugagccccaccguguggcugagcgccaucuggaugaugugguacuggggccccagccuguacagcaucgugagccccuucaucccccugcugcccaucuucuucugccuguggguguacaucuga

SEQ ID NO: 8810 - RNA, 1626 nt, Artificial Sequence
  derived and/or modified CDS sequence (opt4) from Pf(3D7)__XP_001351122.1__HsALB_Pf-CSP(19-272)_L(AAY)_Pf-CSP(346-3 65)_L(AAY)_PADRE_L(PVTN)_HBsAg
augaagugggugaccuucaucagccugcuguuccuguucagcagcgccuacagccuguuccaggaguaccagugcuacggcagcagcagcaacaccagagugcugaacgagcugaacuacgacaacgccggcaccaaccuguacaacgagcuggagaugaacuacuacggcaagcaggagaacugguacagccugaagaagaacagcagaagccugggcgagaacgacgacggcaacaacgaggacaacgagaagcugagaaagcccaagcacaagaagcugaagcagcccgccgacggcaaccccgaccccaacgccaaccccaacguggaccccaacgccaaccccaacguggaccccaacgccaaccccaacguggaccccaacgccaaccccaacgccaaccccaacgccaaccccaacgccaaccccaacgccaaccccaacgccaaccccaacgccaaccccaacgccaaccccaacgccaaccccaacgccaaccccaacgccaaccccaacgccaaccccaacgccaaccccaacgccaaccccaacgccaaccccaacgccaaccccaacgccaaccccaacguggaccccaacgccaaccccaacgccaaccccaacgccaaccccaacgccaaccccaacgccaaccccaacgccaaccccaacgccaaccccaacgccaaccccaacgccaaccccaacgccaaccccaacgccaaccccaacgccaaccccaacgccaaccccaacgccaaccccaacgccaaccccaacgccaaccccaacgccaaccccaacgccaaccccgccgccuacaucaagcccggcagcgccaacaagcccaaggacgagcuggacuacgccaacgacaucgaggccgccuacgccaaguucguggccgccuggacccugaaggccgccgcccccgugaccaacauggagaacaucaccagcggcuuccugggcccccugcuggugcugcaggccggcuucuuccugcugaccagaauccugaccaucccccagagccuggacagcugguggaccagccugaacuuccugggcggcagccccgugugccugggccagaacagccagagccccaccagcaaccacagccccaccagcugcccccccaucugccccggcuacagauggaugugccugagaagauucaucaucuuccuguucauccugcugcugugccugaucuuccugcuggugcugcuggacuaccagggcaugcugcccgugugcccccugauccccggcagcaccaccaccaacaccggccccugcaagaccugcaccacccccgcccagggcaacagcauguuccccagcugcugcugcaccaagcccaccgacggcaacugcaccugcauccccauccccagcagcugggccuucgccaaguaccugugggagugggccagcgugagauucagcuggcugagccugcuggugcccuucgugcagugguucgugggccugagccccaccguguggcugagcgccaucuggaugaugugguacuggggccccagccuguacagcaucgugagccccuucaucccccugcugcccaucuucuucugccuguggguguacaucuga

SEQ ID NO: 8811 - RNA, 1845 nt, Artificial Sequence
  derived and/or modified CDS sequence (opt4) from Pf(3D7)__XP_001351122.1__HsALB_Pf-CSP(19-384)_L(PVTN)_HBsAg
augaagugggugaccuucaucagccugcuguuccuguucagcagcgccuacagccuguuccaggaguaccagugcuacggcagcagcagcaacaccagagugcugaacgagcugaacuacgacaacgccggcaccaaccuguacaacgagcuggagaugaacuacuacggcaagcaggagaacugguacagccugaagaagaacagcagaagccugggcgagaacgacgacggcaacaacgaggacaacgagaagcugagaaagcccaagcacaagaagcugaagcagcccgccgacggcaaccccgaccccaacgccaaccccaacguggaccccaacgccaaccccaacguggaccccaacgccaaccccaacguggaccccaacgccaaccccaacgccaaccccaacgccaaccccaacgccaaccccaacgccaaccccaacgccaaccccaacgccaaccccaacgccaaccccaacgccaaccccaacgccaaccccaacgccaaccccaacgccaaccccaacgccaaccccaacgccaaccccaacgccaaccccaacgccaaccccaacgccaaccccaacguggaccccaacgccaaccccaacgccaaccccaacgccaaccccaacgccaaccccaacgccaaccccaacgccaaccccaacgccaaccccaacgccaaccccaacgccaaccccaacgccaaccccaacgccaaccccaacgccaaccccaacgccaaccccaacgccaaccccaacgccaaccccaacgccaaccccaacgccaaccccaacgccaaccccaacaagaacaaccagggcaacggccagggccacaacaugcccaacgaccccaacagaaacguggacgagaacgccaacgccaacagcgccgugaagaacaacaacaacgaggagcccagcgacaagcacaucaaggaguaccugaacaagauccagaacagccugagcaccgaguggagccccugcagcgugaccugcggcaacggcauccaggugagaaucaagcccggcagcgccaacaagcccaaggacgagcuggacuacgccaacgacaucgagaagaagaucugcaagauggagaagugcagcagcguguucaacguggugaacagcagccccgugaccaacauggagaacaucaccagcggcuuccugggcccccugcuggugcugcaggccggcuucuuccugcugaccagaauccugaccaucccccagagccuggacagcugguggaccagccugaacuuccugggcggcagccccgugugccugggccagaacagccagagccccaccagcaaccacagccccaccagcugcccccccaucugccccggcuacagauggaugugccugagaagauucaucaucuuccuguucauccugcugcugugccugaucuuccugcuggugcugcuggacuaccagggcaugcugcccgugugcccccugauccccggcagcaccaccaccaacaccggccccugcaagaccugcaccacccccgcccagggcaacagcauguuccccagcugcugcugcaccaagcccaccgacggcaacugcaccugcauccccauccccagcagcugggccuucgccaaguaccugugggagugggccagcgugagauucagcuggcugagccugcuggugcccuucgugcagugguucgugggccugagccccaccguguggcugagcgccaucuggaugaugugguacuggggccccagccuguacagcaucgugagccccuucaucccccugcugcccaucuucuucugccuguggguguacaucuga

SEQ ID NO: 8812 - RNA, 1662 nt, Artificial Sequence
  derived and/or modified CDS sequence (opt4) from Pf(3D7)__XP_001351122.1__HsALB_Pf-CSP(19-384)_L(SGG)_Ferritin
augaagugggugaccuucaucagccugcuguuccuguucagcagcgccuacagccuguuccaggaguaccagugcuacggcagcagcagcaacaccagagugcugaacgagcugaacuacgacaacgccggcaccaaccuguacaacgagcuggagaugaacuacuacggcaagcaggagaacugguacagccugaagaagaacagcagaagccugggcgagaacgacgacggcaacaacgaggacaacgagaagcugagaaagcccaagcacaagaagcugaagcagcccgccgacggcaaccccgaccccaacgccaaccccaacguggaccccaacgccaaccccaacguggaccccaacgccaaccccaacguggaccccaacgccaaccccaacgccaaccccaacgccaaccccaacgccaaccccaacgccaaccccaacgccaaccccaacgccaaccccaacgccaaccccaacgccaaccccaacgccaaccccaacgccaaccccaacgccaaccccaacgccaaccccaacgccaaccccaacgccaaccccaacgccaaccccaacgccaaccccaacguggaccccaacgccaaccccaacgccaaccccaacgccaaccccaacgccaaccccaacgccaaccccaacgccaaccccaacgccaaccccaacgccaaccccaacgccaaccccaacgccaaccccaacgccaaccccaacgccaaccccaacgccaaccccaacgccaaccccaacgccaaccccaacgccaaccccaacgccaaccccaacgccaaccccaacaagaacaaccagggcaacggccagggccacaacaugcccaacgaccccaacagaaacguggacgagaacgccaacgccaacagcgccgugaagaacaacaacaacgaggagcccagcgacaagcacaucaaggaguaccugaacaagauccagaacagccugagcaccgaguggagccccugcagcgugaccugcggcaacggcauccaggugagaaucaagcccggcagcgccaacaagcccaaggacgagcuggacuacgccaacgacaucgagaagaagaucugcaagauggagaagugcagcagcguguucaacguggugaacagcagcagcggcggccugagcaaggacaucaucaagcugcugaacgagcaggugaacaaggagaugaacagcagcaaccuguacaugagcaugagcagcuggugcuacacccacagccuggacggcgccggccuguuccuguucgaccacgccgccgaggaguacgagcacgccaagaagcugaucaucuuccugaacgagaacaacgugcccgugcagcugaccagcaucagcgcccccgagcacaaguucgagggccugacccagaucuuccagaaggccuacgagcacgagcagcacaucagcgagagcaucaacaacaucguggaccacgccaucaagagcaaggaccacgccaccuucaacuuccugcagugguacguggccgagcagcacgaggaggaggugcuguucaaggacauccuggacaagaucgagcugaucggcaacgagaaccacggccuguaccuggccgaccaguacgugaagggcaucgccaagagcagaaagagcuga

SEQ ID NO: 8813 - RNA, 1623 nt, Artificial Sequence
  derived and/or modified CDS sequence (opt4) from Pf(3D7)__XP_001351122.1__HsALB_Pf-CSP(93-384)_L(PVTN)_HBsAg
augaagugggugaccuucaucagccugcuguuccuguucagcagcgccuacagcaagcugaagcagcccgccgacggcaaccccgaccccaacgccaaccccaacguggaccccaacgccaaccccaacguggaccccaacgccaaccccaacguggaccccaacgccaaccccaacgccaaccccaacgccaaccccaacgccaaccccaacgccaaccccaacgccaaccccaacgccaaccccaacgccaaccccaacgccaaccccaacgccaaccccaacgccaaccccaacgccaaccccaacgccaaccccaacgccaaccccaacgccaaccccaacgccaaccccaacgccaaccccaacguggaccccaacgccaaccccaacgccaaccccaacgccaaccccaacgccaaccccaacgccaaccccaacgccaaccccaacgccaaccccaacgccaaccccaacgccaaccccaacgccaaccccaacgccaaccccaacgccaaccccaacgccaaccccaacgccaaccccaacgccaaccccaacgccaaccccaacgccaaccccaacgccaaccccaacaagaacaaccagggcaacggccagggccacaacaugcccaacgaccccaacagaaacguggacgagaacgccaacgccaacagcgccgugaagaacaacaacaacgaggagcccagcgacaagcacaucaaggaguaccugaacaagauccagaacagccugagcaccgaguggagccccugcagcgugaccugcggcaacggcauccaggugagaaucaagcccggcagcgccaacaagcccaaggacgagcuggacuacgccaacgacaucgagaagaagaucugcaagauggagaagugcagcagcguguucaacguggugaacagcagccccgugaccaacauggagaacaucaccagcggcuuccugggcccccugcuggugcugcaggccggcuucuuccugcugaccagaauccugaccaucccccagagccuggacagcugguggaccagccugaacuuccugggcggcagccccgugugccugggccagaacagccagagccccaccagcaaccacagccccaccagcugcccccccaucugccccggcuacagauggaugugccugagaagauucaucaucuuccuguucauccugcugcugugccugaucuuccugcuggugcugcuggacuaccagggcaugcugcccgugugcccccugauccccggcagcaccaccaccaacaccggccccugcaagaccugcaccacccccgcccagggcaacagcauguuccccagcugcugcugcaccaagcccaccgacggcaacugcaccugcauccccauccccagcagcugggccuucgccaaguaccugugggagugggccagcgugagauucagcuggcugagccugcuggugcccuucgugcagugguucgugggccugagccccaccguguggcugagcgccaucuggaugaugugguacuggggccccagccuguacagcaucgugagccccuucaucccccugcugcccaucuucuucugccuguggguguacaucuga

SEQ ID NO: 8814 - RNA, 1284 nt, Artificial Sequence; identical to SEQ ID NO: 214
  derived and/or modified CDS sequence (opt4) from Pf(3D7)__XP_001351122.1__HsALB_Pf-CSP(199-377)_L(PVTN)_HBsAg

SEQ ID NO: 8815 - RNA, 981 nt, Artificial Sequence
  derived and/or modified CDS sequence (opt4) from Pf(3D7)__XP_001351122.1__HsALB_Pf-CSP(19-272)_L(AAY)_Pf-CSP(346-3 75)_L(AAY)_Pf-CSP(310-327)
augaagugggugaccuucaucagccugcuguuccuguucagcagcgccuacagccuguuccaggaguaccagugcuacggcagcagcagcaacaccagagugcugaacgagcugaacuacgacaacgccggcaccaaccuguacaacgagcuggagaugaacuacuacggcaagcaggagaacugguacagccugaagaagaacagcagaagccugggcgagaacgacgacggcaacaacgaggacaacgagaagcugagaaagcccaagcacaagaagcugaagcagcccgccgacggcaaccccgaccccaacgccaaccccaacguggaccccaacgccaaccccaacguggaccccaacgccaaccccaacguggaccccaacgccaaccccaacgccaaccccaacgccaaccccaacgccaaccccaacgccaaccccaacgccaaccccaacgccaaccccaacgccaaccccaacgccaaccccaacgccaaccccaacgccaaccccaacgccaaccccaacgccaaccccaacgccaaccccaacgccaaccccaacgccaaccccaacgccaaccccaacguggaccccaacgccaaccccaacgccaaccccaacgccaaccccaacgccaaccccaacgccaaccccaacgccaaccccaacgccaaccccaacgccaaccccaacgccaaccccaacgccaaccccaacgccaaccccaacgccaaccccaacgccaaccccaacgccaaccccaacgccaaccccaacgccaaccccaacgccaaccccaacgccaaccccgccgccuacaucaagcccggcagcgccaacaagcccaaggacgagcuggacuacgccaacgacaucgagaagaagaucugcaagauggagaagugcagcgccgccuacgagcccagcgacaagcacaucaaggaguaccugaacaagauccagaacagccuguga

SEQ ID NO: 8816 - RNA, 1029 nt, Artificial Sequence
  derived and/or modified CDS sequence (opt4) from Pf(3D7)__XP_001351122.1__HsALB_Pf-CSP(19-272)_L(AAY)_Pf-CSP(346-3 75)_L(AAY)_Pf-CSP(310-327)_L(AAY)_PADRE
augaagugggugaccuucaucagccugcuguuccuguucagcagcgccuacagccuguuccaggaguaccagugcuacggcagcagcagcaacaccagagugcugaacgagcugaacuacgacaacgccggcaccaaccuguacaacgagcuggagaugaacuacuacggcaagcaggagaacugguacagccugaagaagaacagcagaagccugggcgagaacgacgacggcaacaacgaggacaacgagaagcugagaaagcccaagcacaagaagcugaagcagcccgccgacggcaaccccgaccccaacgccaaccccaacguggaccccaacgccaaccccaacguggaccccaacgccaaccccaacguggaccccaacgccaaccccaacgccaaccccaacgccaaccccaacgccaaccccaacgccaaccccaacgccaaccccaacgccaaccccaacgccaaccccaacgccaaccccaacgccaaccccaacgccaaccccaacgccaaccccaacgccaaccccaacgccaaccccaacgccaaccccaacgccaaccccaacgccaaccccaacguggaccccaacgccaaccccaacgccaaccccaacgccaaccccaacgccaaccccaacgccaaccccaacgccaaccccaacgccaaccccaacgccaaccccaacgccaaccccaacgccaaccccaacgccaaccccaacgccaaccccaacgccaaccccaacgccaaccccaacgccaaccccaacgccaaccccaacgccaaccccaacgccaaccccgccgccuacaucaagcccggcagcgccaacaagcccaaggacgagcuggacuacgccaacgacaucgagaagaagaucugcaagauggagaagugcagcgccgccuacgagcccagcgacaagcacaucaaggaguaccugaacaagauccagaacagccuggccgccuacgccaaguucguggccgccuggacccugaaggccgccgccuga

SEQ ID NO: 8817 - RNA, 1029 nt, Artificial Sequence
  derived and/or modified CDS sequence (opt4) from Pf(3D7)__XP_001351122.1__HsALB_Pf-CSP(19-272)_L(AAY)_Pf-CSP(310-3 27)_L(AAY)_Pf-CSP(346-375)_L(AAY)_PADRE
augaagugggugaccuucaucagccugcuguuccuguucagcagcgccuacagccuguuccaggaguaccagugcuacggcagcagcagcaacaccagagugcugaacgagcugaacuacgacaacgccggcaccaaccuguacaacgagcuggagaugaacuacuacggcaagcaggagaacugguacagccugaagaagaacagcagaagccugggcgagaacgacgacggcaacaacgaggacaacgagaagcugagaaagcccaagcacaagaagcugaagcagcccgccgacggcaaccccgaccccaacgccaaccccaacguggaccccaacgccaaccccaacguggaccccaacgccaaccccaacguggaccccaacgccaaccccaacgccaaccccaacgccaaccccaacgccaaccccaacgccaaccccaacgccaaccccaacgccaaccccaacgccaaccccaacgccaaccccaacgccaaccccaacgccaaccccaacgccaaccccaacgccaaccccaacgccaaccccaacgccaaccccaacgccaaccccaacgccaaccccaacguggaccccaacgccaaccccaacgccaaccccaacgccaaccccaacgccaaccccaacgccaaccccaacgccaaccccaacgccaaccccaacgccaaccccaacgccaaccccaacgccaaccccaacgccaaccccaacgccaaccccaacgccaaccccaacgccaaccccaacgccaaccccaacgccaaccccaacgccaaccccaacgccaaccccgccgccuacgagcccagcgacaagcacaucaaggaguaccugaacaagauccagaacagccuggccgccuacaucaagcccggcagcgccaacaagcccaaggacgagcuggacuacgccaacgacaucgagaagaagaucugcaagauggagaagugcagcgccgccuacgccaaguucguggccgccuggacccugaaggccgccgccuga

SEQ ID NO: 8818 - RNA, 1083 nt, Artificial Sequence
  derived and/or modified CDS sequence (opt4) from Pf(3D7)__XP_001351122.1__HsALB_Pf-CSP(19-272)_L(AAY)_Pf-CSP(310-3 27)_L(AAY)_Pf-CSP(346-375)_L(AAY)_PADRE_L(AAY)_P2
augaagugggugaccuucaucagccugcuguuccuguucagcagcgccuacagccuguuccaggaguaccagugcuacggcagcagcagcaacaccagagugcugaacgagcugaacuacgacaacgccggcaccaaccuguacaacgagcuggagaugaacuacuacggcaagcaggagaacugguacagccugaagaagaacagcagaagccugggcgagaacgacgacggcaacaacgaggacaacgagaagcugagaaagcccaagcacaagaagcugaagcagcccgccgacggcaaccccgaccccaacgccaaccccaacguggaccccaacgccaaccccaacguggaccccaacgccaaccccaacguggaccccaacgccaaccccaacgccaaccccaacgccaaccccaacgccaaccccaacgccaaccccaacgccaaccccaacgccaaccccaacgccaaccccaacgccaaccccaacgccaaccccaacgccaaccccaacgccaaccccaacgccaaccccaacgccaaccccaacgccaaccccaacgccaaccccaacgccaaccccaacguggaccccaacgccaaccccaacgccaaccccaacgccaaccccaacgccaaccccaacgccaaccccaacgccaaccccaacgccaaccccaacgccaaccccaacgccaaccccaacgccaaccccaacgccaaccccaacgccaaccccaacgccaaccccaacgccaaccccaacgccaaccccaacgccaaccccaacgccaaccccaacgccaaccccgccgccuacgagcccagcgacaagcacaucaaggaguaccugaacaagauccagaacagccuggccgccuacaucaagcccggcagcgccaacaagcccaaggacgagcuggacuacgccaacgacaucgagaagaagaucugcaagauggagaagugcagcgccgccuacgccaaguucguggccgccuggacccugaaggccgccgccgccgccuaccaguacaucaaggccaacagcaaguucaucggcaucaccgagcuguga

SEQ ID NO: 8819 - RNA, 1047 nt, Artificial Sequence
  derived and/or modified CDS sequence (opt4) from Pf(3D7)__XP_001351122.1__HsALB_Pf-CSP(19-272)_L(AAY)_Pf-CSP(310-3 27)_Linker (AAY)_Pf-CSP(346-397)
augaagugggugaccuucaucagccugcuguuccuguucagcagcgccuacagccuguuccaggaguaccagugcuacggcagcagcagcaacaccagagugcugaacgagcugaacuacgacaacgccggcaccaaccuguacaacgagcuggagaugaacuacuacggcaagcaggagaacugguacagccugaagaagaacagcagaagccugggcgagaacgacgacggcaacaacgaggacaacgagaagcugagaaagcccaagcacaagaagcugaagcagcccgccgacggcaaccccgaccccaacgccaaccccaacguggaccccaacgccaaccccaacguggaccccaacgccaaccccaacguggaccccaacgccaaccccaacgccaaccccaacgccaaccccaacgccaaccccaacgccaaccccaacgccaaccccaacgccaaccccaacgccaaccccaacgccaaccccaacgccaaccccaacgccaaccccaacgccaaccccaacgccaaccccaacgccaaccccaacgccaaccccaacgccaaccccaacgccaaccccaacguggaccccaacgccaaccccaacgccaaccccaacgccaaccccaacgccaaccccaacgccaaccccaacgccaaccccaacgccaaccccaacgccaaccccaacgccaaccccaacgccaaccccaacgccaaccccaacgccaaccccaacgccaaccccaacgccaaccccaacgccaaccccaacgccaaccccaacgccaaccccaacgccaaccccgccgccuacgagcccagcgacaagcacaucaaggaguaccugaacaagauccagaacagccuggccgccuacaucaagcccggcagcgccaacaagcccaaggacgagcuggacuacgccaacgacaucgagaagaagaucugcaagauggagaagugcagcagcguguucaacguggugaacagcagcaucggccugaucauggugcugagcuuccuguuccugaacuga

SEQ ID NO: 8820 - RNA, 1647 nt, Artificial Sequence
  derived and/or modified CDS sequence (opt5) from Pf(3D7)__XP_001351122.1__LumSynt_L(GGS4-GGG)_Pf-CSP(19-397)
augcagaucuacgagggcaagcugaccgccgaagggcucagauucggaauuguggcuagccgguuuaaccacgcccuggucgaccgccuuguugagggcgcgaucgaugcuauugugagacaugggggacgggaagaggacaucacacuggugcgcguccccggcuccugggaaauuccuguggccgccggggagcucgcuagaaaagaggauaucgacgccguuaucgcuauuggagugcugauccggggcgccacgccgcacuucgauuauauugcgucugaagucagcaagggccuugccgaccugucccucgagcugcgcaaacccaucaccuuuggggugauuacagcugauacccuggaacaagccaucgagagagcuggaacaaagcauggcaauaaagggugggaggccgcgcucucugccauugaaauggcuaaccuguucaagagccuucggggaggcuccgggggaucuggcggcagcgggggauccggcgggggacuguuucaggaguaccagugcuauggcuccucuuccaauacccgcguucucaacgaacugaauuacgacaacgccgggacaaaucuuuauaacgagcuggaaaugaauuacuauggaaagcaggagaacugguacagccucaaaaagaacucuagaucccugggcgagaaugaugacggcaauaacgaagauaaugagaaacugcggaagccuaaacacaagaagcucaaacaacccgcugacgggaacccugaucccaacgccaauccuaacguggacccgaaugccaaccccaaugucgacccuaacgcuaaucccaacguggauccuaaugcgaaccccaaugccaacccgaaugcuaacccuaaugccaaccccaacgccaauccuaacgcuaaucccaacgccaaucccaacgcgaauccuaacgcuaauccgaacgccaaucccaacgccaauccuaacgcuaaucccaacgccaacccuaaugcuaaccccaaugccaacccgaaugcgaacccuaaugccaaccccaauguggacccuaacgcuaaucccaacgccaauccuaacgcuaaucccaacgccaacccgaaugcgaacccuaaugccaaccccaaugcuaaccccaaugccaacccuaaugcuaacccgaaugccaaccccaaugccaacccuaaugcuaaccccaaugcgaacccuaacgccaaucccaacgcuaauccuaacgccaaucccaacgccaauccgaacgcuaauccuaacaagaauaaccagggaaauggccaggggcauaacaugcccaaugauccuaaccgcaacgucgacgaaaaugccaacgcgaauagcgcuguuaaaaacaauaacaaugaggaacccucugauaagcacaucaaagaguaccugaacaagauccagaauagccuuagcaccgagugguccccguguucugugacgugcggaaacggcauucaagugagaaucaaaccugggagcgccaauaagcccaaggacgaacuggauuaugccaacgacauugagaaaaagaucuguaaaauggaaaagugcuccagcgucuucaaugugguuaacucuuccauuggccucaucauggugcugagcuuucuuuuccugaauuga

SEQ ID NO: 8821 - RNA, 1509 nt, Artificial Sequence
  derived and/or modified CDS sequence (opt5) from Pf(3D7)__XP_001351122.1__HsALB_Pf-CSP(19-272)_L(PVTN)_HBsAg
augaagugggugaccuucaucagccugcucuuucuguucuccucugccuacagccuuuuucaggaguaucaaugcuacggcuccucuagcaacacaagaguccugaaugaacucaacuaugacaaugcugggacgaaccuguacaaugagcuugaaaugaacuauuacggaaaacaggagaauugguauucccugaagaaaaacucucggagccucggcgaaaaugaugacgggaacaaugaggauaacgagaagcugcgcaaacccaagcacaagaaacugaagcagccugccgacggaaauccggaucccaacgcgaauccuaacguugaccccaacgcuaauccuaacguggaucccaaugccaacccuaauguggacccgaacgccaaucccaacgcuaauccuaacgccaaucccaacgcuaauccuaacgccaaucccaacgcgaacccgaaugccaacccuaaugcuaaccccaaugccaacccuaaugcuaaccccaaugccaaccccaaugcgaacccuaaugccaacccgaaugcuaaccccaacgccaauccuaacgcuaaucccaacgccaauccuaacgucgaucccaaugccaacccgaaugcuaacccuaaugcgaaccccaaugccaacccuaaugcuaaccccaacgccaauccuaacgccaaucccaacgcuaauccgaacgccaauccuaacgcgaaucccaacgcuaaucccaacgccaauccuaacgccaauccgaacgcuaaucccaacgccaacccuaaugcuaaccccaaugccaacccuaaugcgaaucccccugugaccaacauggaaaacauuacauccggcuuccucgggccccugcuuguucugcaggccggauuuuuccuccugaccagaauccuuacaauuccgcaaagccuggacucuugguggaccucccucaauuuucugggcggcagcccugugugucuggggcagaacucucagucccccacaagcaaucauucuccuaccuccugucccccgaucugcccuggauaccgguggaugugccuccgcagauucauuaucuuucuguucauccuucugcucugucugauuuuucuucugguccuccuggauuaccagggcaugcugcccgugugcccucucauccccgggagcacgaccacaaacaccggacccuguaaaacaugcaccacgccugcucaaggcaauuccauguucccgucuuguugcuguacaaagcccaccgacgggaacugcacaugcauuccuauccccagcuccugggccuuugcuaaauaucugugggagugggccagcguucgguucucuuggcuuucccugcucgugccuuucguccagugguuugugggacugagccccaccguguggcuuucugcgauuuggaugaugugguacuggggcccuagccuguauuccaucgucucuccguucauuccccuccugccuaucuuuuucugucuguggguuuacaucuga

SEQ ID NO: 8822 - RNA, 1626 nt, Artificial Sequence
  derived and/or modified CDS sequence (opt5) from Pf(3D7)__XP_001351122.1__HsALB_Pf-CSP(19-272)_L(AAY)_Pf-CSP(346-3 65)_L(AAY)_PADRE_L(PVTN)_HBsAg
augaagugggugaccuucaucagccugcucuuucuguucuccucugccuacagccuuuuucaggaguaucaaugcuacggcuccucuagcaacacaagaguccugaaugaacucaacuaugacaaugcugggacgaaccuguacaaugagcuugaaaugaacuauuacggaaaacaggagaauugguauucccugaagaaaaacucucggagccucggcgaaaaugaugacgggaacaaugaggauaacgagaagcugcgcaaacccaagcacaagaaacugaagcagccugccgacggaaauccggaucccaacgcgaauccuaacguugaccccaacgcuaauccuaacguggaucccaaugccaacccuaauguggacccgaacgccaaucccaacgcuaauccuaacgccaaucccaacgcuaauccuaacgccaaucccaacgcgaacccgaaugccaacccuaaugcuaaccccaaugccaacccuaaugcuaaccccaaugccaaccccaaugcgaacccuaaugccaacccgaaugcuaaccccaacgccaauccuaacgcuaaucccaacgccaauccuaacgucgaucccaaugccaacccgaaugcuaacccuaaugcgaaccccaaugccaacccuaaugcuaaccccaacgccaauccuaacgccaaucccaacgcuaauccgaacgccaauccuaacgcgaaucccaacgcuaaucccaacgccaauccuaacgccaauccgaacgcuaaucccaacgccaacccuaaugcuaaccccaaugccaacccuaaugcgaaccccgccgcuuacauuaaaccuggcuccgccaauaagcccaaagacgaacucgauuacgcuaacgacaucgaggccgcguaugccaaguucguggcugccuggacccugaaggcugccgccccgguuacaaauauggaaaacauuaccagcggguuucuuggaccucugcucgugcugcaggcuggcuucuuucuucugacaagaauccucaccauuccccaaucucuggauuccugguggacaagccugaauuuccucggcgggucuccugucugucugggacagaacucccagagccccaccucuaaucauuccccgacgagcugcccucccaucuguccuggcuaccgguggaugugccuucgcagauuuaucauuuuccuguuuauccuccugcuuugucugauuuuccuccuggugcugcucgacuaucaggggaugcugcccguuugcccccuuaucccuggauccaccacaaccaacacaggcccguguaaaaccugcacgacacccgcgcaaggaaauucuauguuuccuagcuguugcuguaccaagcccacagacgggaacuguaccugcauuccuauccccuccagcugggccuucgcuaaauaccugugggagugggccucugugcgguucuccuggcucagccugcuugucccuuuugugcagugguucgugggccugucuccgaccgucuggcucagcgccauuuggaugaugugguauuggggccccucccuguacucuaucguuagcccuuuuaucccccugcucccuauuuucuuuugccuguggguguauaucuga

SEQ ID NO: 8823 - RNA, 1845 nt, Artificial Sequence
  derived and/or modified CDS sequence (opt5) from Pf(3D7)__XP_001351122.1__HsALB_Pf-CSP(19-384)_L(PVTN)_HBsAg
augaagugggugaccuucaucagccugcucuuucuguucuccucugccuacagccuuuuucaggaguaucaaugcuacggcuccucuagcaacacaagaguccugaaugaacucaacuaugacaaugcugggacgaaccuguacaaugagcuugaaaugaacuauuacggaaaacaggagaauugguauucccugaagaaaaacucucggagccucggcgaaaaugaugacgggaacaaugaggauaacgagaagcugcgcaaacccaagcacaagaaacugaagcagccugccgacggaaauccggaucccaacgcgaauccuaacguugaccccaacgcuaauccuaacguggaucccaaugccaacccuaauguggacccgaacgccaaucccaacgcuaauccuaacgccaaucccaacgcuaauccuaacgccaaucccaacgcgaacccgaaugccaacccuaaugcuaaccccaaugccaacccuaaugcuaaccccaaugccaaccccaaugcgaacccuaaugccaacccgaaugcuaaccccaacgccaauccuaacgcuaaucccaacgccaauccuaacgucgaucccaaugccaacccgaaugcuaacccuaaugcgaaccccaaugccaacccuaaugcuaaccccaacgccaauccuaacgccaaucccaacgcuaauccgaacgccaauccuaacgcgaaucccaacgcuaaucccaacgccaauccuaacgccaauccgaacgcuaaucccaacgccaacccuaaugcuaaccccaaugccaacccuaaugcgaaccccaauaaaaacaaucagggcaacgggcaaggacauaauaugccuaacgaccccaauagaaacguggaugaaaaugccaacgcuaacuccgccguuaagaauaacaauaacgaggaaccgagcgacaaacacauuaaggaguaccucaauaagauccagaacucucuguccaccgaguggagcccuuguucugugacaugcggcaauggcauucagguccggaucaaacccggguccgcuaacaagccuaaagaugaacuugacuacgccaaugacauugagaagaaaaucuguaagauggaaaaaugcagcucuguguucaacguugucaauuccagccccgugaccaacauggagaauaucacauccggauuucugggcccgcuccuggugcuucaggcgggguucuuucugcucacccgcauucugacaaucccucaaucucuggauagcugguggaccucccucaacuuccugggaggcagccccgugugucuugggcaaaauucucaguccccuacgagcaaccauucucccaccagcugucccccuauuugcccgggauauagauggaugugccugcggcgcuuuaucauuuuccucuuuauccugcuucugugucucauuuuccugcugguccuccuggacuaccagggcaugcuucccguuugcccucugauccccggcuccacaaccacaaacaccgggccuuguaagacgugcacaacccccgcccagggaaauucuauguuuccuagcugcuguugcacaaagccgaccgauggcaacuguaccugcauccccauuccuuccagcugggcuuucgccaaauaucucugggaaugggcuucugugagauucuccuggcugagccuucuggugcccuuuguccagugguucguggggcucucuccuacaguuuggcuguccgccaucuggaugaugugguacuggggacccagccuguauuccauugugucuccguuuaucccucuccugcccauuuucuuuugucuuugggucuacaucuga

SEQ ID NO: 8824 - RNA, 1662 nt, Artificial Sequence
  derived and/or modified CDS sequence (opt5) from Pf(3D7)__XP_001351122.1__HsALB_Pf-CSP(19-384)_L(SGG)_Ferritin
augaagugggugaccuucaucagccugcucuuucuguucuccucugccuacagccuuuuucaggaguaucaaugcuacggcuccucuagcaacacaagagugcugaaugaacucaacuaugacaaugcugggacgaaccuguacaaugagcuugaaaugaacuauuacggaaaacaggagaauugguauucccugaagaaaaacucucggagccucggcgaaaaugaugacgggaacaaugaggauaacgagaagcugcgcaaacccaagcacaagaaacugaagcagccugccgacggaaauccggaucccaacgcgaauccuaacguugaccccaacgcuaauccuaacguggaucccaaugccaacccuaauguggacccgaacgccaaucccaacgcuaauccuaacgccaaucccaacgcuaauccuaacgccaaucccaacgcgaacccgaaugccaacccuaaugcuaaccccaaugccaacccuaaugcuaaccccaaugccaaccccaaugcgaacccuaaugccaacccgaaugcuaaccccaacgccaauccuaacgcuaaucccaacgccaauccuaacgucgaucccaaugccaacccgaaugcuaacccuaaugcgaaccccaaugccaacccuaaugcuaaccccaacgccaauccuaacgccaaucccaacgcuaauccgaacgccaauccuaacgcgaaucccaacgcuaaucccaacgccaauccuaacgccaauccgaacgcuaaucccaacgccaacccuaaugcuaaccccaaugccaacccuaaugcgaaccccaauaaaaacaaucagggcaacgggcaaggacauaauaugccuaacgaccccaauagaaacguggaugaaaaugccaacgcuaacuccgccguuaagaauaacaauaacgaggaaccgagcgacaaacacauuaaggaguaccucaauaagauccagaacucucuguccaccgaguggagcccuuguucugugacaugcggcaauggcauucagguccggaucaaacccggguccgcuaacaagccuaaagaugaacuugacuacgccaaugacauugagaagaaaaucuguaagauggaaaaaugcagcucuguguucaacguugugaacuccagcuccggaggccugucuaaggauaucauuaagcuccugaaugagcaggucaauaaagaaaugaacagcuccaaucuuuauaugagcaugucuuccugguguuacacccauagccuggacggggcgggacucuuucuguucgaucacgccgcugaggaguaugaacaugccaagaaacugaucauuuuucucaacgagaacaaugugcccgugcaacugacaucuaucagcgcuccggaacacaaguucgagggccuuacccagauuuuucagaaagccuacgaacacgagcagcauaucuccgagucuauuaacaauaucgucgaccacgccaucaagagcaaggaucaugcuacauucaacuuucugcaaugguauguugcggaacagcacgaggaagagguccucuucaaagacauucuggauaagaucgaacuuauugggaaugagaaccacggacuguaccucgccgaccaguaugugaaaggcaucgcuaagucccgcaaaagcuga

SEQ ID NO: 8825 - RNA, 1623 nt, Artificial Sequence
  derived and/or modified CDS sequence (opt5) from Pf(3D7)__XP_001351122.1__HsALB_Pf-CSP(93-384)_L(PVTN)_HBsAg
augaagugggugaccuucaucagccugcucuuucuguucuccucugccuacagcaaacuuaagcagcccgcugacggcaacccugauccgaaugccaaccccaaugucgacccuaacgcgaaucccaacguugauccuaaugcuaaccccaauguggacccuaacgccaauccgaacgccaaucccaacgcuaauccuaacgccaaccccaaugcuaacccuaaugccaaccccaaugcgaacccgaaugccaacccuaaugcuaaccccaaugccaacccuaaugcuaaccccaaugccaaccccaacgcgaauccuaacgccaauccgaacgcuaaucccaacgccaauccuaacgcuaaucccaacguggauccuaaugccaaccccaaugccaacccgaaugcuaacccuaacgcgaaucccaacgccaauccuaacgcuaaucccaacgccaauccuaacgccaaucccaacgcuaauccgaacgccaauccuaacgcgaaucccaacgcuaaccccaaugccaacccuaaugccaacccgaaugcuaaccccaaugccaacccuaaugcuaaccccaaugccaacccuaauaaaaacaaucaagggaacggacagggccacaauaugcccaacgacccuaacagaaaugucgaugagaacgcgaaugccaacuccgcugugaagaauaacaauaacgaggaacccucugacaaacauauuaaggaauaucugaauaagauccagaacagccucuccacagaguggucuccgugcagcguuacgugugggaaugggauucaggugcggaucaaaccuggcuccgccaacaagcccaaagaugaacuggacuacgcuaaugauauugagaagaaaaucugcaagauggagaaguguagcucugucuuuaacgugguuaauuccagcccugugaccaacauggaaaacaucacaucuggguuccuuggaccccugcucguccugcaagccggcuuuuuccugcucacccgcauucugacaaucccgcagucccuugacagcugguggaccucucugaauuuucucggcggguccccugugugccugggacagaacagccagucccccacaucuaaucacagcccuaccuccuguccucccauuugccccggcuauagauggaugugucuucggcgcuucaucauuuuucuguucauccuccugcugugccucauuuuucugcuugugcugcucgauuaccaagggaugcugccggucuguccccuuaucccuggaagcacgaccacaaacaccggccccugcaaaacauguaccacgccugcgcagggaaauucuauguuccccuccugcugcuguacaaagccuaccgacggaaacugcacauguaucccgauucccagcucuugggccuuugcuaaauaucugugggagugggccagcguuagauucuccuggcucucucugcuggugccuuucgugcagugguuugucggccucagccccaccguguggcuguccgcuaucuggaugaugugguacuggggcccuagccuuuauucuauuguuucccccuucaucccgcugcucccuaucuuuuucugccuguggguguacauuuga

SEQ ID NO: 8826 - RNA, 1284 nt, Artificial Sequence; identical to SEQ ID NO: 250
  derived and/or modified CDS sequence (opt5) from Pf(3D7)__XP_001351122.1__HsALB_Pf-CSP(199-377)_L(PVTN)_HBsAg

SEQ ID NO: 8827 - RNA, 981 nt, Artificial Sequence
  derived and/or modified CDS sequence (opt5) from Pf(3D7)__XP_001351122.1__HsALB_Pf-CSP(19-272)_L(AAY)_Pf-CSP(346-3 75)_L(AAY)_Pf-CSP(310-327)
augaagugggugaccuucaucagccugcucuuucuguucuccucugccuacagccuuuuucaggaguaucaaugcuacggcuccucuagcaacacaagaguccugaaugaacucaacuaugacaaugcugggacgaaccuguacaaugagcuugaaaugaacuauuacggaaaacaggagaauugguauucccugaagaaaaacucucggagccucggcgaaaaugaugacgggaacaaugaggauaacgagaagcugcgcaaacccaagcacaagaaacugaagcagccugccgacggaaauccggaucccaacgcgaauccuaacguugaccccaacgcuaauccuaacguggaucccaaugccaacccuaauguggacccgaacgccaaucccaacgcuaauccuaacgccaaucccaacgcuaauccuaacgccaaucccaacgcgaacccgaaugccaacccuaaugcuaaccccaaugccaacccuaaugcuaaccccaaugccaaccccaaugcgaacccuaaugccaacccgaaugcuaaccccaacgccaauccuaacgcuaaucccaacgccaauccuaacgucgaucccaaugccaacccgaaugcuaacccuaaugcgaaccccaaugccaacccuaaugcuaaccccaacgccaauccuaacgccaaucccaacgcuaauccgaacgccaauccuaacgcgaaucccaacgcuaaucccaacgccaauccuaacgccaauccgaacgcuaaucccaacgccaacccuaaugcuaaccccaaugccaacccuaaugcgaaccccgccgcuuacauuaaaccuggcuccgccaauaagcccaaagacgaacucgauuacgcuaacgacaucgagaagaagauuuguaaaauggaaaagugcagcgccgcguaugagccgucugauaaacauaucaaggaguaccugaauaaaauucagaacucccuuuga

SEQ ID NO: 8828 - RNA, 1029 nt, Artificial Sequence
  derived and/or modified CDS sequence (opt5) from Pf(3D7)__XP_001351122.1__HsALB_Pf-CSP(19-272)_L(AAY)_Pf-CSP(346-3 75)_L(AAY)_Pf-CSP(310-327)_L(AAY)_PADRE
augaagugggugaccuucaucagccugcucuuucuguucuccucugccuacagccuuuuucaggaguaucaaugcuacggcuccucuagcaacacaagaguccugaaugaacucaacuaugacaaugcugggacgaaccuguacaaugagcuugaaaugaacuauuacggaaaacaggagaauugguauucccugaagaaaaacucucggagccucggcgaaaaugaugacgggaacaaugaggauaacgagaagcugcgcaaacccaagcacaagaaacugaagcagccugccgacggaaauccggaucccaacgcgaauccuaacguugaccccaacgcuaauccuaacguggaucccaaugccaacccuaauguggacccgaacgccaaucccaacgcuaauccuaacgccaaucccaacgcuaauccuaacgccaaucccaacgcgaacccgaaugccaacccuaaugcuaaccccaaugccaacccuaaugcuaaccccaaugccaaccccaaugcgaacccuaaugccaacccgaaugcuaaccccaacgccaauccuaacgcuaaucccaacgccaauccuaacgucgaucccaaugccaacccgaaugcuaacccuaaugcgaaccccaaugccaacccuaaugcuaaccccaacgccaauccuaacgccaaucccaacgcuaauccgaacgccaauccuaacgcgaaucccaacgcuaaucccaacgccaauccuaacgccaauccgaacgcuaaucccaacgccaacccuaaugcuaaccccaaugccaacccuaaugcgaaccccgccgcuuacauuaaaccuggcuccgccaauaagcccaaagacgaacucgauuacgcuaacgacaucgagaagaagauuuguaaaauggaaaagugcagcgccgcguaugagccgucugauaaacauaucaaggaguaccugaauaaaauucagaacucccuugccgcuuaugccaaguucguggcugccuggacccugaaagccgcugcguga

SEQ ID NO: 8829 - RNA, 1029 nt, Artificial Sequence
  derived and/or modified CDS sequence (opt5) from Pf(3D7)__XP_001351122.1__HsALB_Pf-CSP(19-272)_L(AAY)_Pf-CSP(310-3 27)_L(AAY)_Pf-CSP(346-375)_L(AAY)_PADRE
augaagugggugaccuucaucagccugcucuuucuguucuccucugccuacagccuuuuucaggaguaucaaugcuacggcuccucuagcaacacaagaguccugaaugaacucaacuaugacaaugcugggacgaaccuguacaaugagcuugaaaugaacuauuacggaaaacaggagaauugguauucccugaagaaaaacucucggagccucggcgaaaaugaugacgggaacaaugaggauaacgagaagcugcgcaaacccaagcacaagaaacugaagcagccugccgacggaaauccggaucccaacgcgaauccuaacguugaccccaacgcuaauccuaacguggaucccaaugccaacccuaauguggacccgaacgccaaucccaacgcuaauccuaacgccaaucccaacgcuaauccuaacgccaaucccaacgcgaacccgaaugccaacccuaaugcuaaccccaaugccaacccuaaugcuaaccccaaugccaaccccaaugcgaacccuaaugccaacccgaaugcuaaccccaacgccaauccuaacgcuaaucccaacgccaauccuaacgucgaucccaaugccaacccgaaugcuaacccuaaugcgaaccccaaugccaacccuaaugcuaaccccaacgccaauccuaacgccaaucccaacgcuaauccgaacgccaauccuaacgcgaaucccaacgcuaaucccaacgccaauccuaacgccaauccgaacgcuaaucccaacgccaacccuaaugcuaaccccaaugccaacccuaaugcgaaccccgccgcuuacgaaccuuccgacaaacauauuaaggaguaccucaauaaaauccagaacagccuggccgcuuauauuaagcccggcucugccaauaagccgaaagaugaacuugacuacgcgaacgauaucgagaagaaaauuuguaagauggagaaaugcuccgccgcuuaugccaaguucguggcugccuggacccugaaagccgcugcguga

SEQ ID NO: 8830 - RNA, 1083 nt, Artificial Sequence
  derived and/or modified CDS sequence (opt5) from Pf(3D7)__XP_001351122.1__HsALB_Pf-CSP(19-272)_L(AAY)_Pf-CSP(310-3 27)_L(AAY)_Pf-CSP(346-375)_L(AAY)_PADRE_L(AAY)_P2
augaagugggugaccuucaucagccugcucuuucuguucuccucugccuacagccuuuuucaggaguaucaaugcuacggcuccucuagcaacacaagaguccugaaugaacucaacuaugacaaugcugggacgaaccuguacaaugagcuugaaaugaacuauuacggaaaacaggagaauugguauucccugaagaaaaacucucggagccucggcgaaaaugaugacgggaacaaugaggauaacgagaagcugcgcaaacccaagcacaagaaacugaagcagccugccgacggaaauccggaucccaacgcgaauccuaacguugaccccaacgcuaauccuaacguggaucccaaugccaacccuaauguggacccgaacgccaaucccaacgcuaauccuaacgccaaucccaacgcuaauccuaacgccaaucccaacgcgaacccgaaugccaacccuaaugcuaaccccaaugccaacccuaaugcuaaccccaaugccaaccccaaugcgaacccuaaugccaacccgaaugcuaaccccaacgccaauccuaacgcuaaucccaacgccaauccuaacgucgaucccaaugccaacccgaaugcuaacccuaaugcgaaccccaaugccaacccuaaugcuaaccccaacgccaauccuaacgccaaucccaacgcuaauccgaacgccaauccuaacgcgaaucccaacgcuaaucccaacgccaauccuaacgccaauccgaacgcuaaucccaacgccaacccuaaugcuaaccccaaugccaacccuaaugcgaaccccgccgcuuacgaaccuuccgacaaacauauuaaggaguaccucaauaaaauccagaacagccuggccgcuuauauuaagcccggcucugccaauaagccgaaagaugaacuugacuacgcgaacgauaucgagaagaaaauuuguaagauggagaaaugcuccgccgcuuaugccaaguucguggcugccuggacccugaaagccgcugcggccgcuuaccaauauaucaaggccaauagcaaguuuaucgggauuacagaacucuga

SEQ ID NO: 8831 - RNA, 1047 nt, Artificial Sequence
  derived and/or modified CDS sequence (opt5) from Pf(3D7)__XP_001351122.1__HsALB_Pf-CSP(19-272)_L(AAY)_Pf-CSP(310-3 27)_Linker (AAY)_Pf-CSP(346-397)
augaagugggugaccuucaucagccugcucuuucuguucuccucugccuacagccuuuuucaggaguaucaaugcuacggcuccucuagcaacacaagaguccugaaugaacucaacuaugacaaugcugggacgaaccuguacaaugagcuugaaaugaacuauuacggaaaacaggagaauugguauucccugaagaaaaacucucggagccucggcgaaaaugaugacgggaacaaugaggauaacgagaagcugcgcaaacccaagcacaagaaacugaagcagccugccgacggaaauccggaucccaacgcgaauccuaacguugaccccaacgcuaauccuaacguggaucccaaugccaacccuaauguggacccgaacgccaaucccaacgcuaauccuaacgccaaucccaacgcuaauccuaacgccaaucccaacgcgaacccgaaugccaacccuaaugcuaaccccaaugccaacccuaaugcuaaccccaaugccaaccccaaugcgaacccuaaugccaacccgaaugcuaaccccaacgccaauccuaacgcuaaucccaacgccaauccuaacgucgaucccaaugccaacccgaaugcuaacccuaaugcgaaccccaaugccaacccuaaugcuaaccccaacgccaauccuaacgccaaucccaacgcuaauccgaacgccaauccuaacgcgaaucccaacgcuaaucccaacgccaauccuaacgccaauccgaacgcuaaucccaacgccaacccuaaugcuaaccccaaugccaacccuaaugcgaaccccgccgcuuacgaaccuuccgacaaacauauuaaggaguaccucaauaaaauccagaacagccuggccgcuuauauuaagcccggcucugccaauaagccgaaagaugaacuugacuacgcgaacgauaucgagaagaaaauuuguaagauggagaaaugcuccagcguguucaauguugugaacucuuccaucgggcugaucaugguccucagcuuucuguuccuuaauuga

SEQ ID NO: 8832 - RNA, 1647 nt, Artificial Sequence
  derived and/or modified CDS sequence (opt6) from Pf(3D7)__XP_001351122.1__LumSynt_L(GGS4-GGG)_Pf-CSP(19-397)
augcaaauauacgaaggaaaacuaacagcagaaggauuacgauucggcauaguagcaucaagguucaaccacgcauuaguagauagacuaguagaaggagcaauagacgcaauaguccgacauggaggacgagaagaagauauaacacuagucagaguaccagggagcugggaaaucccaguagcagcaggagaacucgcaagaaaagaagauaucgacgccguaaucgcaaucgggguacuaauaagaggcgcaacaccccauuucgacuacauagcaagcgaaguaucaaaaggauuagcagaccuaaguuuagaacuaagaaaaccuauuacauucggcgucauaacggcagacacauuagaacaagccaucgaaagagcaggaacaaaacacggaaacaaaggcugggaagcagcacuaagcgcaauugaaauggcaaauuuauucaaaucccuaagaggcggcucagguggcaguggaggaucaggaggaucaggaggaggccuauuccaagaauaucaaugcuacggaucgagcucgaauacacgcguauuaaacgaauuaaacuacgacaacgcaggaacaaaccuauacaacgaacuagaaaugaacuauuauggaaaacaagagaacugguacucccuaaaaaaaaacagucgaagcuuaggagaaaaugacgacggaaauaacgaagacaacgaaaaacuaagaaaacccaaacauaaaaaauuaaaacaacccgcugacggaaacccagacccaaacgcuaacccgaacguugauccaaaugcaaacccaaauguggauccaaaugcaaaccccaacguagauccaaaugcaaacccaaacgcaaaccccaaugccaacccaaacgccaacccuaaugcuaauccaaacgcaaacccaaacgcaaacccgaacgcaaauccaaacgcaaacccuaaugcuaacccaaaugcaaauccaaacgcaaacccaaacgcuaacccaaacgcaaacccaaaugcaaacccaaaugcaaacccaaacgcaaauccaaacguagacccaaacgcaaauccaaacgcaaauccaaacgcaaacccaaacgccaaccccaaugcaaauccgaacgcaaacccaaacgcaaacccaaacgcaaacccaaacgcaaacccaaaugccaacccaaacgcaaacccgaacgcaaacccaaacgcaaacccaaacgcaaacccuaaugcgaacccaaaugccaacccaaacgcaaaccccaacgcuaacccaaacaaaaacaaucaaggaaacggacaagggcacaacaugccaaacgauccaaacagaaaugucgacgaaaacgccaaugcaaacagugccguaaaaaauaauaacaacgaagaaccuucagacaaacacauaaaagaauacuuaaacaaaauacaaaacucauuaucaaccgaauggagcccauguucuguuacaugcggaaauggaauacaaguaagaauaaaaccaggaucagcaaacaaaccaaaagacgaauuagacuacgcaaaugauauagaaaaaaaaauaugcaagauggaaaaaugcaguucuguauuuaacguaguaaacagcucaauaggucuaauaaugguacuauccuuucuuuuccugaacuaa

SEQ ID NO: 8833 - RNA, 1509 nt, Artificial Sequence
  derived and/or modified CDS sequence (opt6) from Pf(3D7)__XP_001351122.1__HsALB_Pf-CSP(19-272)_L(PVTN)_HBsAg
augaaauggguaaccuucaucucacuauuauucuuauuuucaucugcauacucacucuuccaagaauaccaaugcuacgguucaucuucuaacacaagaguacuaaacgaacuaaacuacgacaacgcaggaacaaaccucuauaacgaacuugaaaugaacuacuauggaaaacaagaaaacugguauucccuaaaaaaaaacucaagauccuuaggagaaaacgacgacggaaauaacgaagacaacgaaaaacuaagaaaaccaaaacacaaaaaacuaaaacaacccgcagacggaaacccagacccaaacgcaaacccaaacguagacccaaacgcaaacccaaacgucgacccaaacgccaauccaaacguagacccaaacgcuaacccaaacgccaauccaaacgcaaauccaaaugccaacccaaacgcaaacccaaaugcgaauccaaaugcaaaccccaaugcaaacccaaacgcaaauccaaacgcaaacccaaacgcaaacccuaacgcaaauccaaaugcaaacccuaacgcaaacccaaacgcaaauccaaacgcaaacccaaaugcaaauccaaacgucgacccaaacgcaaacccgaacgcaaacccaaacgcaaacccaaaugcaaauccaaaugcaaaccccaaugcaaacccaaacgcaaacccaaacgcuaacccaaaugcaaacccaaacgcaaacccaaacgcaaauccaaacgcaaacccaaacgcaaacccaaaugcaaacccaaacgcaaaccccaaugcaaauccaaacgcaaacccaaacgcaaacccacccguaaccaacauggaaaacaucacaucaggauuccuuggaccccucuuaguacuucaagcaggauucuuccuauuaacaagaauacuaacaauaccucaaucuuuagauucaugguggacuucauuaaauuuccuaggaggaagcccaguaugcuuaggacaaaacagccaaucaccaaccucaaaccacucaccaaccucaugcccaccaauaugcccaggauaccgauggaugugccuaagaagauucauaauauucuuauucauacuacuacuaugccucauauucuuacuaguacuauuagacuaccaaggaaugcugccagucugcccacuuauaccagguagcaccaccacuaacacaggaccuugcaaaacaugcacaacacccgcucaaggaaauucuauguuuccaucaugcugcugcacuaaacccacagauggcaauuguacaugcauaccaauccccucaucaugggcauuugccaaauacuuaugggaaugggcaucuguaagauucucuuggcuaucacucuuaguaccauucguacaaugguucguaggccuauccccuacaguauggcuauccgcaauauggaugaugugguacuggggaccaucacuauacucaauagucucacccuucauaccacuauuaccaauauucuucugccuauggguauauauauaa

SEQ ID NO: 8834 - RNA, 1626 nt, Artificial Sequence
  derived and/or modified CDS sequence (opt6) from Pf(3D7)__XP_001351122.1__HsALB_Pf-CSP(19-272)_L(AAY)_Pf-CSP(346-3 65)_L(AAY)_PADRE_L(PVTN)_HBsAg
augaaaugggucaccuucauuuccuuauuauucuuauuuucguccgcauacucacuauuucaagaauaucaauguuacggaucaagcucaaacacccgcguacucaacgaacuaaacuacgacaacgcaggaacaaaccuauauaacgaacuagaaaugaauuauuacggaaaacaagaaaacugguauucacuuaaaaaaaacuccagaucccuuggcgaaaacgacgacggaaauaaugaagacaacgaaaaacuuagaaaaccaaaacauaaaaaacuaaaacaaccugcagacgguaacccagauccaaaugcuaacccaaauguagacccuaacgcuaacccaaacguagauccaaacgccaacccaaacguagauccaaacgcaaacccaaacgcaaauccaaaugcaaacccaaacgccaaccccaacgcaaacccaaaugcaaauccuaaugcaaaucccaacgcaaauccaaacgcaaauccaaaugcaaaccccaacgcaaacccaaaugcaaauccaaaugcaaauccaaaugcaaacccaaacgcaaacccaaaugcaaauccuaacgcaaacccaaacgucgaccccaacgcaaauccaaacgcaaacccaaacgcaaaccccaaugcaaacccaaaugcaaacccaaacgcaaacccaaacgcaaaccccaacgcaaauccaaacgcaaauccaaaugcaaauccaaacgcaaaccccaaugcaaaccccaaugcuaacccaaacgccaaucccaacgcaaacccaaacgcaaaucccaacgcaaauccaaacgcaaacccugcagcauacauaaaacccggcucugcuaauaaacccaaagaugaacucgacuaugccaacgacauagaagcagccuacgcaaaauucguagcugcauggacauuaaaagcagcagcaccagugacaaacauggaaaacauuacaucaggauucuuagguccauuauuaguccuccaagcaggauucuucuuacuaacuagaauauuaacaauaccacaaucccuagacucuugguggacuucacuaaauuuccuaggaggauccccaguaugucucggucaaaauucucaaucaccuacaucaaaccauucaccaacaagcugccccccaaucugucccggauacagauggaugugccuacgcagauucauuauauuucuauucauacuacuucuaugccuaauauuccuacuaguccuucuagacuaccaaggaaugcuacccguaugcccacuuauaccaggauccacaacaacaaacacagguccaugcaaaacaugcacaacaccagcccaagguaauucuauguucccaucaugcuguugcacaaaaccaacagacgguaacugcacaugcaucccaauacccucaucaugggcauucgcaaaauaccuaugggaaugggcuucaguaagauucuccugguuaucccuuuuagucccauucguacaaugguucguaggauuaucacccacuguauggcuaucagcaauauggaugaugugguauuggggcccaucucuuuacucaaucgucuccccuuuuauuccacuacuacccauauuuuucugccuauggguauacauuuaa

SEQ ID NO: 8835 - RNA, 1845 nt, Artificial Sequence
  derived and/or modified CDS sequence (opt6) from Pf(3D7)__XP_001351122.1__HsALB_Pf-CSP(19-384)_L(PVTN)_HBsAg
augaaauggguaaccuucauaucucucuuauuccuuuuuucaucugcauauucacuauuucaagaauaucaauguuauggaucaucaucaaacacccgaguacucaacgaauuaaauuacgacaacgcagguacuaacuuauacaacgaauuagaaaugaauuacuauggaaaacaagaaaacugguauucccucaaaaaaaacucucgaucucuaggcgaaaacgacgacggcaacaacgaagacaacgaaaaacuacguaaacccaaacacaaaaaacuaaaacaaccagcagauggaaacccagacccaaacgcaaacccaaacguagacccaaacgcaaauccaaacguagacccgaacgcaaauccaaauguagaucccaaugcuaauccaaaugccaacccaaacgcaaacccuaacgcuaaucccaacgcaaacccaaacgcaaacccaaaugcaaacccaaacgcaaaccccaacgcaaacccaaaugcaaauccaaaugcaaauccaaacgccaacccaaaugccaacccaaacgcaaauccaaacgcuaaccccaacgcaaaccccaacgccaaucccaacguagaccccaacgcaaacccaaaugcaaauccaaacgcaaaccccaaugcaaacccaaacgcuaacccuaaugcaaacccaaacgccaacccaaaugcaaaccccaacgccaacccaaacgcaaauccaaacgcaaacccaaacgcuaacccaaacgccaacccaaacgcaaacccaaacgcuaacccaaacgcaaacccaaaugcaaacccaaaugcuaauccaaauaaaaacaaccaaggaaacggccaaggacauaauaugccuaacgacccaaacagaaacguagacgaaaaugcaaacgcaaacuccgcaguaaaaaauaacaauaacgaagaacccuccgacaaacauauaaaagaauaucuaaacaaaauacaaaauucacucucuacugaaugguccccaugcucaguaacauguggaaacggaauccaaguacgcauaaaaccaggaucagcaaacaaaccaaaagacgaacuagacuacgcaaacgauauagaaaaaaaaauaugcaaaauggaaaaaugcuccuccguauucaacguagucaauucaucuccaguaaccaauauggaaaauauaaccuccggauuccuaggaccacuacucguuuuacaagcaggauucuucuuacuaacaagaauacucacuauaccacaaucccuggauucuugguggacaucccuaaauuucuuaggcggaucacccguaugccuaggccaaaauagccaaaguccaacuucaaaccacuccccaacuucuugcccaccaauaugccccggcuacagauggaugugccuucgacgauucauaauauuucuauucauacuauuacuaugucuaauauuccuacucguucuauuagacuaccaaggaauguuaccaguuugcccacuaauaccugguucaacaaccacuaacacuggucccugcaaaacauguaccaccccagcccaaggaaacucaauguuccccucaugcuguugcacaaaaccaaccgacggaaauugcacaugcauacccauaccaucuucuugggcauuugcuaaauaucuaugggaaugggcaucaguacgcuucucauggcuaucucuacuaguaccauucguccaaugguucguaggccuaucaccaacaguauggcuaucugcaauauggaugaugugguacuggggucccuccuuauauucaauuguaucaccuuuuaucccacuccuacccauauucuucuguuuauggguauacauauaa

SEQ ID NO: 8836 - RNA, 1662 nt, Artificial Sequence
  derived and/or modified CDS sequence (opt6) from Pf(3D7)__XP_001351122.1__HsALB_Pf-CSP(19-384)_L(SGG)_Ferritin
augaaauggguaacauuuauaucucuauuauucuuauucuccucagcauacucacucuuucaagaauaccaaugcuacgguucuucauccaacacacgaguccuaaacgaauuaaacuacgacaaugcaggaaccaaucuauacaaugaacuugaaaugaacuacuacggaaaacaagaaaacugguacucccuaaaaaaaaacucacgaagccuaggagaaaaugacgacggaaacaacgaagacaacgaaaaacuacgaaaacccaaacacaaaaaacuaaaacaacccgccgacggcaauccagauccaaacgcaaacccaaacguagaccccaacgccaacccaaacguagauccaaacgcaaauccaaauguugauccaaaugcaaaccccaacgcaaacccaaacgcaaacccaaacgcaaacccaaacgcaaacccaaacgcaaauccaaaugcaaaucccaacgcaaauccaaacgcaaauccaaaugcaaacccaaacgcuaaucccaacgcuaacccaaacgcaaacccaaacgcaaacccgaacgcuaacccaaacgcaaacccaaacgcaaaccccaacguagacccaaacgcaaacccaaacgcaaaccccaacgcaaacccaaacgcaaacccaaacgcaaaccccaacgcaaaccccaacgcaaacccaaacgccaaccccaaugcaaacccaaacgccaacccaaacgcaaacccaaacgcaaacccaaacgcaaacccaaacgcaaauccaaacgcaaacccaaacgcaaacccaaacgcaaacccaaaugcaaacccaaacaaaaacaaccaaggaaauggacaaggacacaacaugccaaacgacccaaaccguaacguagaugaaaaugccaacgcaaacucagccguaaaaaacaacaacaacgaagaaccuucagacaaacacauaaaagaauacuuaaacaaaauacaaaacucauuaucaacugaauggucccccuguucagucacaugcggaaauggaauacaaguaagaauuaaaccagguucagccaacaaaccaaaagacgaacuagacuacgcaaacgacauugaaaaaaaaauauguaaaauggaaaaauguaguucagucuucaacguaguaaacucaucauccggaggauuauccaaagacauaauaaaacucuuaaaugaacaaguaaacaaagaaaugaacucgagcaaccucuauaugucaaugucauccuggugcuacacccauucccuagacggcgccggacuauuccuguucgaccaugcagcagaagaauaugaacacgcaaaaaagcuaaucaucuucuuaaacgaaaacaaugucccaguacaacuaaccuccauaucagcaccugaacauaaauucgaaggacuaacacaaauauuucaaaaagcauacgaacacgaacaacacauaucagaaucaauuaauaacauaguagaccacgcaaucaaaagcaaggaccacgcaacauucaacuuucuacaaugguacguagcagaacaacaugaagaagaaguacucuucaaagacaucuuagacaaaauugaacucauaggaaacgaaaaucacggacucuaccucgcagaccaguacguaaaaggaaucgcaaaaucacguaaaagcuaa

SEQ ID NO: 8837 - RNA, 1623 nt, Artificial Sequence
  derived and/or modified CDS sequence (opt6) from Pf(3D7)__XP_001351122.1__HsALB_Pf-CSP(93-384)_L(PVTN)_HBsAg
augaaauggguaacuuuuauaucccuccuauuucuauuuucaucagccuauucaaaacuaaaacaacccgcagauggaaaucccgacccaaaugcaaauccaaauguagauccaaacgccaacccaaaugucgacccaaaugcaaacccaaacguagauccuaacgcaaacccaaaugcuaauccaaacgcuaacccaaacgcaaauccaaaugcuaacccaaacgcaaacccuaacgcaaacccaaacgcuaacccaaacgcaaacccaaacgccaacccaaacgcaaaccccaacgcaaacccuaacgcaaacccaaacgcaaacccaaaugccaacccaaacgcaaacccaaacgcaaacccaaacguagaccccaacgcuaauccaaaugcaaauccaaacgcaaacccaaaugccaacccaaacgccaacccuaaugcaaacccaaacgcaaacccaaaugcaaaccccaacgcaaauccaaacgcaaauccaaaugcaaacccaaacgcuaacccaaacgcaaaccccaaugcaaacccaaacgcaaauccaaaugcaaacccaaaugcaaauccaaaugcaaacccaaauaaaaacaaccaaggaaacggacaaggccauaacaugccaaacgacccaaaccgcaacgucgaugaaaacgccaacgcaaauucagcgguuaaaaacaacaacaaugaagaacccucagacaaacacauaaaagaauacuuaaacaaaauacaaaacucacuaucgacagaaugguccccaugcuccguaaccugcgguaauggaauacaagucagaauaaaaccaggaucagcuaauaaaccaaaagacgaauuagacuacgcaaacgacauagaaaagaaaauaugcaaaauggaaaaauguucuucaguauuuaacguagucaacucaucacccguaacuaacauggaaaacauaaccucaggauuucuagguccuuuacucguacuacaagcaggauuuuuccuacuuacccgaauccuaacaauaccucaaucucuagacucaugguggacaucccuaaauuucuuaggcggaucaccaguuugccucggacaaaacucucaaucaccaacuucaaaucacuccccaacaucuugcccaccaauaugcccaggauaucgauggaugugucuacgacguuuuauaauauuucuauuuauacuacuacucugucuaauauuccuauuaguacuacucgacuaucaaggaaugcuccccgucuguccccucauacccggaucaacaacuacaaacaccggaccgugcaaaaccugcacaaccccagcucaaggaaauucaauguucccaucaugcugcuguacaaaaccaacagauggaaacugcacaugcauaccaaucccaucaagcugggccuuugccaaauauuuaugggaaugggccuccgucagauucucauggcucucccuucuaguuccauucguacaaugguuuguaggccuauccccaaccguauggcuauccgccauauggaugaugugguauuggggaccaucacuauacucaauaguauccccauucauaccacuccuacccauauucuuuugccuauggguauacauuuaa

SEQ ID NO: 8838 - RNA, 1284 nt, Artificial Sequence
  derived and/or modified CDS sequence (opt6) from Pf(3D7)__XP_001351122.1__HsALB_Pf-CSP(199-377)_L(PVTN)_HBsAg
augaaauggguaacauucauaucauuacucuucuuauuuuccucugcauacucagauccaaaugcaaacccaaaugcaaacccaaacgcaaacccaaaugccaauccaaaugcaaacccaaaugcaaacccaaacgcaaacccaaacgcaaacccaaacgcaaacccuaaugcaaacccaaaugcaaauccaaacgcuaacccaaacgcaaacccaaaugccaacccaaacgccaauccaaacgcaaacccaaacgcaaaucccaaugcaaacccuaacaaaaacaaucaaggaaacggacaaggccacaacaugccaaaugacccaaaccgcaauguagacgaaaaugccaacgcaaacuccgcuguaaaaaacaauaacaacgaagaaccuuccgauaaacauauaaaagaauacuuaaauaaaauacaaaauucauuaucaacagaauggucaccaugcucagucacaugcggaaauggaauacaaguaagaauaaaacccgguuccgcaaacaaaccaaaagacgaacuagacuacgcaaaugacaucgaaaaaaaaauaugcaaaauggaaaaauguucuucaguaccaguaacaaacauggaaaacaucaccucuggauuccuaggaccacuauuaguacuacaagcaggauucuuccuccuaacaagaauauuaacaauaccacaaucacuugacucaugguggacaucccucaauuuccuaggaggauccccaguaugucuaggucaaaacucucaaucuccaacauccaaccauucacccacaucaugcccucccauaugcccaggauaccgauggaugugccucagaagauucauaauauuccuauucauauuacuccuauguuuaaucuuucuacuagucuuauuagacuaccaaggaaugcuaccaguaugcccacuaaucccaggauccacaacaacaaacacaggccccugcaaaacauguacaacaccagcacaaggaaacucaauguucccaucaugcuguugcacaaaaccaacagacggaaacugcacaugcaucccaauaccaucaucuugggcauuugcaaaauacuuaugggaaugggcaucaguacgcuuuucauggcucucccuccucguaccauucguccaaugguucguaggucuaucaccaacaguuuggcuauccgcuauauggaugaugugguauuggggcccuucccuauacucaauaguuucaccauuuauaccacuccuaccaauauuuuucugccuuuggguauacauauaa

SEQ ID NO: 8839 - RNA, 981 nt, Artificial Sequence
  derived and/or modified CDS sequence (opt6) from Pf(3D7)__XP_001351122.1__HsALB_Pf-CSP(19-272)_L(AAY)_Pf-CSP(346-3 75)_L(AAY)_Pf-CSP(310-327)
augaaauggguaaccuucauuucacuucucuuccuauucuccagcgcauacucacucuuccaagaauaccaaugcuacggcucaaguuccaacacacgaguacuaaacgaauuaaacuacgacaaugcuggaaccaaccuauacaacgaacucgaaaugaacuacuacgguaaacaagaaaacugguauucacuaaaaaaaaacucaaggucccuaggagaaaacgacgacggaaacaacgaagacaacgaaaaauuaagaaaaccaaaacacaaaaaacuaaaacaacccgcagacggaaaccccgacccaaacgcaaacccaaacguagauccaaacgcaaacccaaacguagacccaaacgcaaacccaaacguagacccaaacgcaaacccuaaugcaaacccaaacgcaaacccaaacgcaaacccaaacgcaaacccaaacgcaaacccaaacgcaaaccccaacgccaacccaaacgcaaacccaaacgcaaacccaaacgcaaacccaaacgcaaacccaaacgcaaacccaaacgcaaacccaaacgcaaacccaaaugcaaacccaaacgcaaacccaaacguagacccaaacgcaaacccaaacgcaaacccaaaugcaaacccaaacgcaaacccaaacgcaaacccaaacgcuaacccaaacgcaaacccaaacgcuaauccaaaugcuaaccccaacgcaaacccaaaugcaaacccaaacgcuaauccaaaugcaaauccaaacgcaaacccaaacgcaaacccaaacgcaaacccaaacgcaaacccaaacgcaaauccagccgcauacauaaaacccggcucagcaaacaaaccaaaagacgaacuagacuacgccaacgacauagaaaaaaaaauaugcaaaauggaaaaaugcucagccgcauacgaaccaucagacaaacacaucaaagaauacuuaaacaaaauacaaaacagcuuauaa

SEQ ID NO: 8840 - RNA, 1029 nt, Artificial Sequence
  derived and/or modified CDS sequence (opt6) from Pf(3D7)__XP_001351122.1__HsALB_Pf-CSP(19-272)_L(AAY)_Pf-CSP(346-3 75)_L(AAY)_Pf-CSP(310-327)_L(AAY)_PADRE
augaaauggguaacauucauaucacuacuauuccuauucucauccgccuacucacucuuucaagaauaucaaugcuacggaucaagcucaaauacaagaguacuaaacgaacuaaacuacgacaacgcaggaaccaaccuauacaacgaacuagaaaugaacuacuacggaaaacaagaaaacugguacucacuuaaaaaaaacucaagaucacuaggagaaaacgacgacggaaacaacgaagacaacgaaaaacuacgaaaaccaaaacauaaaaaacuaaaacaaccagcagacggaaacccagacccaaacgcaaauccaaacguagacccaaaugcaaacccaaacguagacccaaacgcaaacccaaacguagacccaaaugcaaacccaaacgcaaauccaaacgcaaacccaaacgcaaacccaaacgcaaacccaaacgcaaacccaaacgcaaacccaaaugcaaauccaaacgcaaacccaaaugcaaacccaaacgcaaacccaaacgcgaacccaaacgccaaccccaacgcaaacccaaacgcaaauccaaaugcaaacccaaacgccaauccaaacguagacccaaacgcaaauccaaacgcaaacccaaacgcaaacccaaacgcaaacccuaacgcaaacccaaacgcaaacccaaacgcaaacccaaacgccaacccaaacgcaaaccccaacgcaaacccaaacgcaaacccaaacgcaaaccccaacgcaaauccaaacgcuaacccaaacgcuaaccccaacgcaaacccaaaugcaaacccaaacgccaacccagccgcauacauaaaaccaggaucagcaaauaaaccaaaagacgaacuagacuacgcaaacgacauagaaaaaaaaauaugcaaaauggaaaaaugcuccgcagcauacgaaccaucagacaaacacaucaaagaauaccuaaacaaaauccaaaacucacuagccgccuacgcaaaauuugucgcagcauggacacucaaagcagcagcauaa

SEQ ID NO: 8841 - RNA, 1029 nt, Artificial Sequence
  derived and/or modified CDS sequence (opt6) from Pf(3D7)__XP_001351122.1__HsALB_Pf-CSP(19-272)_L(AAY)_Pf-CSP(310-3 27)_L(AAY)_Pf-CSP(346-375)_L(AAY)_PADRE
augaaauggguaaccuucauaucccuacuauuucuauucuccucagcauacucacuauuccaagaauaccaaugcuacggcucaucaucaaacacaagaguacuaaaugaacuaaacuacgacaacgccggaaccaaccuauacaaugaacucgaaaugaauuacuacggaaaacaagaaaacugguacucacuaaaaaaaaacucaagaagccuaggagaaaacgacgacggaaacaacgaagacaacgaaaaauuacgaaaaccaaaacauaaaaaacuaaaacaacccgccgacggaaacccagacccaaacgcaaacccaaacguagacccaaacgcaaauccaaacguagacccaaacgcaaauccaaauguagacccaaacgcaaacccaaacgcaaacccaaacgcaaacccaaacgcaaacccgaacgcaaauccaaacgcaaacccaaacgcaaacccaaacgcaaacccaaacgcaaacccaaacgcaaaccccaacgcaaacccaaaugcaaacccaaacgcaaacccaaaugcaaauccaaacgcaaacccaaacgcaaacccaaacgcaaacccaaacguagacccaaaugcaaaccccaacgcaaacccaaacgcaaacccaaacgcaaacccaaacgcaaacccaaacgcaaacccaaacgcaaacccaaacgcaaacccaaacgccaauccaaacgcaaauccaaacgcaaacccaaacgcaaacccaaacgcaaacccaaacgcaaacccaaacgcaaacccaaacgcaaacccaaaugcaaacccaaacgcaaacccagcagcauacgaaccuucagacaaacacauaaaagaauacuuaaacaaaauacaaaacucacuagcagccuacaucaaaccaggauccgcaaacaaaccaaaagacgaacuagacuacgcaaacgacauagaaaaaaaaauauguaaaauggaaaaaugcucagccgcauaugcuaaauucgucgcagcauggaccuuaaaagcagcagcauaa

SEQ ID NO: 8842 - RNA, 1083 nt, Artificial Sequence
  derived and/or modified CDS sequence (opt6) from Pf(3D7)__XP_001351122.1__HsALB_Pf-CSP(19-272)_L(AAY)_Pf-CSP(310-3 27)_L(AAY)_Pf-CSP(346-375)_L(AAY)_PADRE_L(AAY)_P2
augaaaugggucaccuucaucucacuacuauuuuuauucuccagcgcauacucauuauuccaagaauaccaaugcuauggcucaagcucaaacacaagaguauuaaacgaacuaaacuacgauaacgccggaacaaaccuauacaacgaacucgaaaugaacuacuauggaaaacaagaaaacugguacucacuuaaaaaaaauucaagaucucuaggagaaaacgacgacggaaacaaugaagacaacgagaaauuaagaaaaccaaaacacaaaaaacuaaaacaaccagcagacggaaacccagacccaaacgcaaacccaaacguagacccaaacgcaaacccaaacguagacccaaacgcaaacccaaacguagauccgaacgcaaauccaaacgcaaauccaaacgcaaacccaaaugcaaacccaaaugcaaacccaaaugcaaacccaaacgcaaacccaaacgcaaacccaaacgcaaaccccaacgcaaacccaaacgcaaauccaaacgcaaacccaaacgcaaacccaaacgcaaaccccaacgcaaacccaaacgcaaacccgaacgcgaacccaaacguggauccaaacgcaaacccaaaugcaaaucccaacgcaaacccaaaugcaaacccaaacgcaaacccaaacgcaaacccaaacgcaaacccaaaugcaaacccaaacgcaaacccaaacgcaaacccaaacgcaaacccaaacgcaaauccaaacgcaaauccaaaugcaaacccaaacgcaaacccaaacgcaaaccccaacgcaaauccaaacgcaaacccagccgcauacgaaccaucagacaaacauauaaaagaauaucuaaacaaaauucaaaacucacucgcagcauacauaaaaccaggaagcgcaaacaaaccuaaagacgaacuagacuacgcaaacgacauagaaaaaaaaauaugcaaaauggaaaaaugcucagcagcguacgcaaaauucguagcagcauggacacuaaaagcagcagccgcagcauaccaauacauaaaagcaaauucaaaauucaucggaauuacagaacuauaa

SEQ ID NO: 8843 - RNA, 1047 nt, Artificial Sequence
  derived and/or modified CDS sequence (opt6) from Pf(3D7)__XP_001351122.1__HsALB_Pf-CSP(19-272)_L(AAY)_Pf-CSP(310-3 27)_Linker (AAY)_Pf-CSP(346-397)
augaaauggguuacauucauaucauuacuauuccucuuuuccucagcauacucacucuuucaagaauaccaaugcuacggcucauccucaaacacaagaguacucaacgaacucaacuaugacaacgcaggaacaaaccucuacaacgaacuugaaaugaauuacuauggaaaacaagaaaacugguacucauuaaaaaaaaacucaagauccuuaggcgaaaacgacgacggaaacaacgaagacaacgagaaacuccgaaaaccaaaacacaaaaaacuaaaacaaccagcagacggaaacccagacccaaacgcaaacccaaacguagacccaaacgcaaacccaaacguagacccaaacgcaaacccaaacguagacccaaacgcaaacccaaacgcaaacccaaacgcaaacccaaacgcaaacccaaacgcaaacccaaacgcaaacccaaacgcaaacccaaacgcaaacccaaacgcaaacccaaacgcaaacccaaacgccaacccaaacgcaaacccaaacgccaacccaaacgcaaacccaaacgcaaacccaaacgcaaauccaaacgccaacccaaacguagacccaaacgcaaacccaaacgcaaacccaaacgcaaacccaaacgcaaaccccaacgccaacccaaacgccaaccccaacgcaaauccaaacgcaaacccaaacgcaaaccccaacgcaaacccaaacgcaaacccaaacgcaaacccaaacgcuaacccaaacgcaaaccccaacgcaaauccaaacgcaaacccaaacgcaaacccaaaugcaaacccagcagcauaugaaccuucagauaaacacauaaaagaauaccuaaacaaaauccaaaacucucucgcagccuacaucaaaccaggaucagcaaacaaacccaaagacgaacuagacuacgcaaaugauaucgaaaaaaaaauaugcaaaauggaaaaaugcucgagcguauuuaacguaguaaacucaucaaucggacucauaaugguacuaucauuucuauuccucaacuaa

SEQ ID NO: 8844 - RNA, 1647 nt, Artificial Sequence
  derived and/or modified CDS sequence (opt11) from Pf(3D7)__XP_001351122.1__LumSynt_L(GGS4-GGG)_Pf-CSP(19-397)
augcaaauauacgagggcaaacucacggcugaaggccuacgcuuuggcaucgucgcaucacgguucaaucacgcacucguggacaggcucguagaaggugccaucgacgcaauaguacgccacggcgggcgcgaagaggacauaacgcuaguacgcguacccggaagcugggaaauccccguagccgcaggcgaacucgcacgcaaagaagacaucgacgccgugaucgcaauaggaguccugauccgaggcgcaacaccacacuucgacuacaucgccuccgaagucucaaaaggccuagcggaucugagccucgaacugcgcaaaccuauaacauucggcgucauaacagccgacacauuagaacaggccauagaaagagccggaaccaaacauggaaacaaaggcugggaagcggcccuaagcgccaucgaaauggcaaaccucuucaaaagccugcgcggaggaucaggcggcagcggcggcuccggaggaagcggcggcggucuuuuucaagaauaccaaugcuacggcuccucaucgaacacacgcguacucaaugaacugaacuacgacaaugcaggaaccaaccucuacaacgaacucgagaugaacuacuacggcaaacaagaaaacugguacucgcuaaagaaaaacuccagaucccugggcgaaaacgacgacggaaacaacgaagacaacgaaaaacuacgcaaaccaaaacacaagaaacuaaaacaaccagcagacggaaacccagacccaaacgcgaacccaaacgucgacccaaacgcaaacccaaacguagacccaaacgcaaacccaaacgucgaccccaacgcaaacccaaacgccaaccccaacgcaaaccccaacgcgaacccaaacgcgaaccccaacgcaaacccaaacgcaaaccccaacgcaaacccaaacgcaaacccaaacgccaacccgaaugccaacccgaacgcaaacccgaacgcaaaccccaacgcgaaccccaacgcaaacccaaaugccaaccccaacgcaaaccccaacguagacccgaacgcaaacccgaacgcaaacccgaacgcaaacccaaacgcaaacccaaacgccaaccccaacgccaacccaaacgcgaacccaaaugcaaaccccaacgccaacccgaacgccaacccaaacgcaaacccgaacgcaaaccccaacgcaaaccccaacgcaaaccccaacgcaaacccgaacgccaacccaaacgcaaacccaaacgcaaacccaaacaaaaacaaccaaggaaacgggcaaggccacaacaugcccaacgacccaaaccgaaauguagaugaaaacgcaaacgccaacagcgcggucaaaaacaacaacaacgaagaacccucggacaaacacauaaaagaauaccuaaacaaaauccagaacucccucucaacagaauggucccccugcucaguuaccugcgguaaugguauacaaguccgcauuaaaccgggaucugccaacaaaccaaaagaugagcuagacuacgccaacgacauagaaaagaaaaucugcaaaauggagaaaugcuccucagucuucaacguaguaaacagcucgauagggcucaucaugguacucuccuuuuuauuccucaacuaa

SEQ ID NO: 8845 - RNA, 1509 nt, Artificial Sequence
  derived and/or modified CDS sequence (opt11) from Pf(3D7)__XP_001351122.1__HsALB_Pf-CSP(19-272)_L(PVTN)_HBsAg
augaaaugggucaccuucaucucccuccucuuccucuucuccucugccuacucacucuuccaagaauaccaaugcuacggcuccucuuccaacacccgcguacucaacgaacucaacuaugacaaugcaggaaccaaccuauacaacgagcuagagaugaacuacuacggcaaacaagaaaacugguacucccucaagaaaaacucacgcucccuuggcgaaaaugacgacggcaacaacgaagacaacgaaaaacuucgcaaacccaaacacaagaaauuaaaacaaccagccgacggcaacccagaccccaacgccaaccccaacgucgaccccaacgccaacccuaacgucgaccccaacgcaaacccuaacgucgauccaaacgccaaccccaacgcuaaccccaacgcaaauccgaacgcaaaccccaacgccaacccuaacgccaaccccaacgccaacccaaacgccaaccccaacgcuaaccccaacgcaaacccgaacgccaaccccaacgccaaccccaacgcaaaccccaacgccaaccccaaugcaaaccccaacgccaacccaaaugccaaccccaacgucgaccccaacgcaaaccccaacgcuaacccuaacgcuaacccaaacgccaacccaaacgcuaaccccaacgccaaccccaacgccaaccccaacgcaaacccaaacgcaaacccuaacgccaacccuaacgcaaaccccaacgcgaaccccaacgcaaaccccaacgcaaaccccaacgccaaccccaacgccaacccaaacgccaauccaaacgcaaaucccccagucaccaacauggaaaacaucaccucaggcuuccucggcccccuucucguccuacaagcugguuucuuccuucuaacccgcauccucacgaucccccaaucccucgacucaugguggaccucacucaacuuucucggaggcucacccguaugccucggacaaaacucccaaucccccaccuccaaccauuccccaaccucaugcccaccaauaugccccggcuaccguuggaugugccuccgccguuucaucauauuccuuuucauacuccuccucugccucaucuuccugcucgugcuccuagacuaucaagguaugcuacccguaugcccacucauccccggcucaaccacgacaaacacuggccccugcaaaacaugcaccacacccgcacaaggaaacuccauguuccccucaugcugcugcaccaaaccaacagacggaaacuguaccugcaucccuauccccuccuccugggccuucgcaaaauaucuaugggagugggccagcguacgcuuuuccuggcuuucccuccugguccccuucguccaaugguucguaggccucuccccaaccguauggcuauccgcaaucuggaugaugugguacuggggcccaucucucuacucaauaguaucacccuucaucccacuccuccccaucuucuucugccucuggguauacaucuaa

SEQ ID NO: 8846 - RNA, 1626 nt, Artificial Sequence
  derived and/or modified CDS sequence (opt11) from Pf(3D7)__XP_001351122.1__HsALB_Pf-CSP(19-272)_L(AAY)_Pf-CSP(346-3 65)_L(AAY)_PADRE_L(PVTN)_HBsAg
augaaauggguaaccuucauaucccuucuauucuuauucucuuccgcauacucccucuuccaagaauaucagugcuacggcucauccucaaacacacgaguccucaacgaacucaacuacgacaacgccggcaccaaucucuacaacgaacucgaaaugaacuacuacggcaaacaagaaaacugguacucccuuaagaaaaacucacgcucucucggcgaaaacgacgacggcaacaacgaagacaacgaaaaauuacgcaaacccaaacacaagaaacucaaacaaccagccgacggcaacccagaccccaaugcaaacccuaacgucgaccccaacgccaacccuaacgucgacccaaacgccaacccgaacgucgaccccaacgcaaacccaaacgccaaccccaaugccaaucccaacgccaacccuaacgccaaccccaacgccaaccccaacgccaacccuaacgccaaccccaaugcaaacccaaacgccaacccaaacgcaaacccaaacgccaauccaaacgccaacccaaacgccaaccccaacgccaacccaaacgccaaucccaacgccaaccccaacguagaccccaaugcgaacccaaacgccaacccuaacgccaaccccaacgcaaacccaaacgcuaacccaaacgcaaaccccaacgcaaaccccaacgcaaacccgaacgcgaaccccaacgccaauccaaacgcaaacccuaacgcaaacccaaacgccaacccaaacgccaacccaaacgcaaacccaaacgccaauccaaacgcaaacccgaacgcaaaccccgccgcuuacaucaaacccggaucggccaacaaacccaaagacgaacuugauuacgccaacgacaucgaagcagccuacgcaaaauucguagcggccuggacccuaaaagcagcagcacccgucacaaacauggaaaacaucacaucuggcuucuuaggcccacuccuaguccuccaggccggcuucuuccuacuaacccguauacucaccauaccacaaucacucgacucaugguggaccucccuaaacuuccucggcggaucacccgucugccugggccaaaacucgcaaucccccaccucaaaucauucgcccacaucaugcccgcccaucugccccggcuaccgguggaugugccuccgcagauucauaaucuuccucuucauacuacuacuuugccuaaucuuccucuuaguccuacucgacuaccaaggcaugcuccccgucugcccccuuauacccggcuccaccaccaccaauaccggccccugcaaaaccugcacaacacccgcccaaggcaacucaauguucccguccugcuguugcaccaaaccaaccgacggaaauugcacaugcaucccaauccccucaucaugggcauucgccaaauaccucugggaaugggccuccguccguuucuccuggcucagccuacucguucccuucguccaaugguuugucggccuuucaccuacaguauggcuauccgccauauggaugaugugguacuggggacccucacucuacucaauugucucccccuucaucccauuacuccccaucuucuucugccucugggucuacauauaa

SEQ ID NO: 8847 - RNA, 1845 nt, Artificial Sequence
  derived and/or modified CDS sequence (opt11) from Pf(3D7)__XP_001351122.1__HsALB_Pf-CSP(19-384)_L(PVTN)_HBsAg
augaaaugggucaccuucauaucacuccuauuccuauuuucaagcgccuacucccucuuccaagaauaucaaugcuauggcucaagcucaaacacccgcguccucaacgagcuaaacuacgacaacgcaggaaccaaccucuacaacgaacuggaaaugaacuacuacggaaaacaagagaacugguacuccuuaaagaaaaacucccgcucccucggcgaaaacgaugacgguaacaacgaagacaaugaaaaacuccgaaaacccaaacacaagaaacuaaaacaaccagccgacggaaaccccgacccgaacgcaaaccccaacguagacccaaacgcaaacccuaauguagacccaaacgccaacccaaacgucgacccaaacgcaaacccaaacgcuaaccccaacgccaacccaaacgccaaccccaacgccaaccccaaugccaacccaaacgcgaaccccaacgcaaaccccaacgccaacccgaacgccaacccaaacgccaacccaaacgccaaccccaacgcgaacccaaacgccaacccaaacgcuaaccccaacgcaaaccccaacgccaacccuaacgucgacccaaacgccaaucccaacgccaaccccaacgcaaaccccaacgccaacccgaacgcgaaccccaacgcaaaccccaacgcaaacccaaacgccaaccccaacgccaacccaaacgccaacccgaacgccaacccaaacgcgaaucccaaugccaaccccaacgccaauccuaaugcaaacccaaacgcaaaccccaacgccaauccgaacgcaaacccgaacaaaaacaaccaagguaacggccaaggccacaacaugcccaacgaccccaaccgcaacgucgacgaaaacgcaaacgccaacuccgcaguuaaaaacaacaacaacgaagaaccaucagacaaacacauaaaagaauaccucaacaaaauccaaaacucgcucuccaccgaauggucccccuguagcguaaccugcgguaauggaauacaaguccgaaucaaaccaggcucugccaacaaacccaaagacgaacuagacuacgccaacgacauugaaaagaaaaucugcaaaauggaaaaauguagcuccgucuucaacguagucaacuccucccccguuaccaacauggagaacauaaccuccggcuuccucggcccccuucucgugcuacaggccggauucuuccuccuaaccaggauccuaaccaucccccagucacucgacuccugguggaccucacucaacuuccucggcggaucccccgucugccucggacaaaacucccaaucccccaccucaaaccacuccccaaccucuugcccgcccauaugccccgguuaccgcuggaugugccuucgccgcuucaucauauuucuauucauccuccuucucugccuaauauuccuacucguacuccucgacuaccaaggcaugcuacccgucugcccucuuauacccggauccacgacaaccaacaccggccccugcaaaaccugcaccacacccgcccaaggcaacucuauguuccccucaugcugcugcacaaaacccaccgacggcaacugcacaugcauaccaauccccucuuccugggccuuugccaaauaccuuugggaaugggcuuccguccguuuuuccugguuaucccuccuggucccauucguccaaugguucgucggccuuucaccaaccgucuggcuauccgccaucuggaugaugugguacuggggucccucccucuacagcaucgucucaccauuuaucccccuccugcccaucuucuucugcuuguggguauacauauga

SEQ ID NO: 8848 - RNA, 1662 nt, Artificial Sequence
  derived and/or modified CDS sequence (opt11) from Pf(3D7)__XP_001351122.1__HsALB_Pf-CSP(19-384)_L(SGG)_Ferritin
augaaaugggucaccuucauaucacuacuuuuccuguucuccucagcauacucacucuuccaagaguaccaaugcuacggcucaucauccaauacccgcguacuuaacgaauuaaacuacgacaacgcaggcaccaaccucuacaacgaacucgaaaugaacuauuacggaaaacaagaaaacugguacucacuaaagaaaaacagcagaucccucggcgaaaacgacgacggcaauaacgaagacaacgaaaaacugagaaaaccuaaacacaagaaacucaaacaacccgcagacggcaaccccgaccccaacgccaacccaaacguagaccccaacgccaaccccaacgucgaccccaacgccaacccuaaugucgacccaaacgcaaacccuaacgcaaaccccaaugccaacccaaacgccaaccccaacgcaaaccccaacgcaaauccaaacgcaaaucccaacgcaaaccccaaugccaaccccaacgcaaacccaaacgccaaccccaacgcaaaccccaacgcuaacccaaacgccaacccaaacgcaaacccaaacgccaaccccaacgcuaaccccaacgucgaccccaacgccaaccccaacgcaaacccaaacgccaaccccaaugcaaacccaaacgccaaccccaacgcaaacccaaacgccaacccaaacgccaaccccaacgcaaaccccaacgcuaaccccaacgcaaaccccaaugcaaacccgaacgccaacccaaacgcaaacccaaacgccaacccaaacgccaaccccaacgccaacccaaacgccaacccaaacaaaaacaaccaagguaacggacaaggccacaacaugcccaacgauccuaaccgcaacguagacgaaaacgccaacgcaaacagcgcagucaaaaacaacaacaacgaggaaccaucagacaaacacaucaaagaauaccucaacaaaauccaaaacucccuauccacagaauggucacccugcuccguaaccugcggcaacggcauccaaguacgcaucaaacccggauccgcaaacaaaccaaaagaugaauuagauuaugcaaacgacauagaaaagaaaauaugcaaaauggaaaaaugcuccuccguauucaacguagucaacuccucuucagggggacucuccaaagacaucaucaaacuucucaacgaacaagucaacaaagagaugaacagcuccaaccucuacaugucaaugucaagcuggugcuacacacacucacuggacggcgccggccucuuccuauucgaccacgccgcagaagaauacgaacacgccaagaaacuuauaaucuuccuaaacgaaaauaacguaccuguccaacucacaucaaucucggccccagaacauaaauucgaagggcucacgcaaauauuucaaaaagcauacgaacacgaacagcacaucuccgaaucaaucaacaacauugucgaccacgcaaucaaauccaaagaccacgccacauucaacuuccuacaaugguacguggccgaacaacacgaagaagaaguccucuucaaagacauacuagacaaaaucgaacuaaucggcaacgaaaaccacggccucuaccuagccgaccaauacguaaaaggaaucgcgaaaucccgcaaauccuaa

SEQ ID NO: 8849 - RNA, 1623 nt, Artificial Sequence
  derived and/or modified CDS sequence (opt11) from Pf(3D7)__XP_001351122.1__HsALB_Pf-CSP(93-384)_L(PVTN)_HBsAg
augaaaugggucaccuuuaucucacuccuauuucucuucucuuccgcauacuccaaacucaaacaacccgcagacggaaaccccgacccaaacgcaaaccccaacguagaccccaacgccaaccccaacgucgaccccaacgccaaccccaacguagaccccaacgcaaaccccaacgccaacccaaacgccaaccccaacgccaaccccaacgccaaucccaacgccaacccaaacgcaaaucccaacgcaaaccccaacgccaaccccaacgccaacccaaacgccaauccaaacgcaaacccuaacgccaacccuaacgcgaaccccaacgccaaccccaacgcaaaccccaacgccaaccccaaugucgaccccaacgccaaccccaacgccaaccccaacgcaaaccccaacgcaaacccaaacgccaaucccaacgccaaccccaacgcaaacccuaacgccaaccccaaugccaauccuaacgccaaccccaacgccaacccuaacgccaacccaaacgccaaccccaacgccaaccccaacgccaacccuaacgccaacccuaacgccaacccaaacgccaauccaaacaagaacaaccaaggcaacggucaaggccacaauaugccaaacgacccaaaccgaaacguagacgaaaacgccaacgccaacuccgccgucaaaaacaacaacaacgaagaacccuccgacaaacacaucaaagaauaucugaacaaaauccaaaacucccucuccaccgaauggucccccugcuccgucacuuguggcaauggcauacaaguccgcaucaaacccggcucagccaacaaacccaaagacgaacucgacuacgcaaacgacaucgaaaagaaaauaugcaaaauggaaaaaugcuccucugucuucaacgucgucaacuccucgcccguaaccaacauggaaaacaucaccucaggauuccucggcccccuacucguccuccaagccggcuucuuccuccucacccgaauccuuacaaucccccaaucccuugacucaugguggaccucccuuaauuuccucggcgguucccccgucugccuuggccaaaacucacaaucccccaccucaaaccacucccccacuuccugcccgcccauaugccccggcuaccgcuggaugugccuccgccgguucaucauauuccucuucauccuacuccucugccuuauauuucuauuaguccuccuagacuaccaaggaaugcuccccguaugcccacuaauccccggauccaccaccaccaacaccggccccugcaaaaccugcaccaccccugcacaaggaaacuccauguucccaucuuguugcugcacaaaaccaaccgacggcaacuguaccugcauccccaucccuucaucaugggccuucgccaaauaccuaugggaaugggccucaguacguuucuccuggcuaucccuccucgucccauucguucaaugguucgucggccuaucccccacgguauggcucuccgcaauauggaugaugugguacuggggccccucacuauacaguauaguuucccccuucauaccccuccuccccauauucuucugccucuggguauacaucuag

SEQ ID NO: 8850 - RNA, 1284 nt, Artificial Sequence
  derived and/or modified CDS sequence (opt11) from Pf(3D7)__XP_001351122.1__HsALB_Pf-CSP(199-377)_L(PVTN)_HBsAg
augaaauggguaaccuucaucucccuccuauucuuauucucaucagccuacuccgacccaaacgcaaaccccaaugccaaccccaacgccaaccccaacgccaaucccaacgccaaccccaacgccaaucccaaugcuaaccccaacgccaacccaaacgccaacccaaacgcaaaccccaacgccaaccccaacgccaaccccaacgccaacccaaacgccaaccccaacgcaaaccccaacgccaacccaaacgccaaccccaacgccaacccaaacaaaaacaaucaaggcaacggccaaggacacaacaugcccaacgaccccaaccgcaacgucgacgaaaacgcaaacgccaacucugcagucaaaaacaacaacaacgaagaacccuccgacaaacacauaaaagaauaccucaacaaaauccaaaacucccucuccacagaaugguccccaugcuccgucacgugcggcaacggcauccaaguacgcaucaaacccggcucugccaacaaaccuaaagacgaacucgacuacgccaacgacaucgaaaagaaaaucugcaaaauggaaaaaugcuccucaguccccguaacuaacauggaaaacaucacguccggcuuccucggcccccuccuaguccuccaagccggcuucuuccuacucacacgcauucuuaccaucccgcaaucacucgacuccugguggaccucccucaacuucuuaggcggcuccccugucugccucggccaaaacucacaaucccccacuucaaaccacucacccaccagcugcccacccauaugcccaggauaccgcuggaugugccuccgccguuucauaaucuuccucuucauacuccuacucugccuaaucuuccuccucguacuccuagacuaccaaggcaugcuccccgucugcccacucauccccggaagcacuacaaccaacaccggccccugcaaaacaugcaccacccccgcacaaggcaacuccauguuccccuccugcugcugcacaaaacccacugauggcaacugcacuugcauccccauccccuccucaugggccuucgccaaauaucucugggaaugggccagcguccgguucucuuggcucucacuccuaguccccuucguucaaugguucguaggccuaucccccaccgucuggcucuccgcaauauggaugaugugguauuggggccccucccucuacuccauuguaucccccuucaucccacuacuccccaucuucuucugccuuugggucuacauauaa

SEQ ID NO: 8851 - RNA, 981 nt, Artificial Sequence
  derived and/or modified CDS sequence (opt11) from Pf(3D7)__XP_001351122.1__HsALB_Pf-CSP(19-272)_L(AAY)_Pf-CSP(346-3 75)_L(AAY)_Pf-CSP(310-327)
augaaauggguaaccuucaucucacuccuauuccuguucuccagugcauacucacucuuccaagaauaccaaugcuacggcuccagcagcaacacgcgaguccucaacgaacuaaacuacgauaacgccggaaccaaccuuuacaacgaacucgaaaugaacuacuacggcaaacaagaaaacugguacucacuaaaaaaaaacagcagaucacuaggcgaaaacgacgacggaaacaacgaagacaacgaaaaacuacgcaagcccaaacacaagaaacucaaacaacccgcagacggaaacccagaccccaacgcaaaccccaacguagaccccaacgcaaaccccaacguagaccccaacgcaaaucccaacguagacccaaacgcaaaccccaacgcaaacccaaacgcaaacccaaacgcgaacccaaacgcaaacccaaacgcaaacccgaacgccaacccaaacgcaaacccaaacgcuaaccccaacgcaaacccaaacgcaaacccaaacgcaaacccaaacgcaaacccaaacgcaaacccaaacgcaaacccgaacgcaaacccaaacgcaaaccccaacguagacccaaacgccaacccaaacgcaaaccccaacgccaacccaaacgcaaacccaaacgcaaacccaaacgcaaacccaaacgcaaacccaaacgcaaacccaaacgcaaaccccaacgcgaacccaaacgccaacccaaacgcaaacccaaacgcgaacccaaacgccaaccccaacgcaaaccccaacgcaaaccccaacgcaaacccaaacgcaaaccccgccgcuuacauaaaacccggcucggccaauaaaccaaaagacgaacucgacuacgccaacgacauagaaaaaaaaauaugcaaaauggaaaaaugcagcgccgccuacgaaccaucagacaaacacaucaaagaauaccucaacaaaauacaaaacagccucuaa

SEQ ID NO: 8852 - RNA, 1029 nt, Artificial Sequence
  derived and/or modified CDS sequence (opt11) from Pf(3D7)__XP_001351122.1__HsALB_Pf-CSP(19-272)_L(AAY)_Pf-CSP(346-3 75)_L(AAY)_Pf-CSP(310-327)_L(AAY)_PADRE
augaaauggguaacauuuaucucccuccucuuccucuuuuccuccgcauacucacucuuccaagaauaccaaugcuacggaucaagcuccaacacccgcguccuuaacgaacuuaacuacgacaacgccggcaccaacuuauacaacgaacucgagaugaacuacuacggcaaacaagaaaacugguacucccucaaaaaaaacuccagaucccucggcgaaaacgacgacggaaacaacgaagacaacgaaaaacuccgcaaacccaaacacaaaaaacucaaacaacccgcugacggcaacccugaccccaacgccaaccccaacguagaccccaacgccaaucccaacguagacccaaacgccaaccccaacguagaccccaacgccaaccccaacgcaaacccaaacgccaaccccaacgccaaccccaacgcgaacccaaacgccaaccccaacgccaacccuaacgccaacccgaacgccaaccccaacgccaaccccaacgccaaccccaacgcgaaccccaacgcaaaccccaacgccaaccccaacgcaaaccccaacgccaaccccaacgccaaccccaacguagaccccaacgccaacccaaacgccaacccaaacgcaaaccccaacgccaauccaaacgcaaaccccaacgcaaaccccaaugccaacccaaacgccaaccccaacgccaacccaaacgccaacccaaacgccaaccccaacgcaaacccaaacgcaaaccccaacgcaaacccuaacgccaacccaaacgccaacccaaacgcaaaccccaacgcaaaccccgccgccuacaucaaaccaggcuccgccaauaaaccaaaagacgaacucgacuacgcaaaugacauagaaaaaaaaauaugcaaaauggaaaaaugcuccgcagccuacgaacccagcgacaaacauaucaaagaauacuuaaacaaaauccaaaacucccuagccgccuacgccaaauucgucgcagccuggacccucaaagccgccgccuaa

SEQ ID NO: 8853 - RNA, 1029 nt, Artificial Sequence
  derived and/or modified CDS sequence (opt11) from Pf(3D7)__XP_001351122.1__HsALB_Pf-CSP(19-272)_L(AAY)_Pf-CSP(310-3 27)_L(AAY)_Pf-CSP(346-375)_L(AAY)_PADRE
augaaaugggugaccuuuaucucacuccucuuccucuucucaagcgcauacucacucuuccaagaauaccaaugcuacgguucaagcucaaacacaagaguccucaacgaacucaacuacgacaacgccggaaccaaccucuacaacgaacucgaaaugaacuacuacggcaaacaagaaaacugguacucacucaaaaaaaacagcaggucccuaggcgaaaacgacgacggaaacaacgaagacaacgaaaaacuccgcaaaccaaaacacaaaaaacugaaacaacccgcagacggaaacccagaccccaacgcaaacccgaacgucgacccgaacgccaacccaaacguagacccaaacgcaaaccccaacgucgacccaaacgcaaacccaaacgcaaacccaaacgcaaacccgaacgcaaacccaaacgcgaacccaaacgcaaacccaaacgcaaacccaaacgccaacccaaacgcaaacccaaaugcaaaccccaacgcaaacccgaacgcaaacccaaacgcaaaccccaacgcaaacccaaacgcuaacccaaacgcgaaccccaacgcaaacccaaacguggacccaaacgcaaacccaaacgcaaacccaaacgcgaacccgaacgcaaacccaaacgcgaacccaaacgcaaaccccaacgcaaacccaaacgcaaacccaaacgccaacccaaacgcaaacccaaacgcgaaccccaacgccaacccaaacgcaaacccaaacgcaaacccaaacgcaaacccaaacgcaaacccaaacgccaacccaaacgcaaacccagcugccuacgaacccuccgacaaacacaucaaagaguaccugaacaaaauccaaaacucccucgcagccuacaucaagcccggauccgcaaacaaacccaaagacgaacucgacuacgccaacgacauagaaaaaaaaaucugcaaaauggaaaaaugcucagccgcauacgcaaaauucguagcagccuggacccuaaaagcggcagcauaa

SEQ ID NO: 8854 - RNA, 1083 nt, Artificial Sequence
  derived and/or modified CDS sequence (opt11) from Pf(3D7)__XP_001351122.1__HsALB_Pf-CSP(19-272)_L(AAY)_Pf-CSP(310-3 27)_L(AAY)_Pf-CSP(346-375)_L(AAY)_PADRE_L(AAY)_P2
augaaaugggugaccuucauaucacuauuauuccucuucucaagcgcauacucacucuuccaagaauaccaaugcuacggcuccuccucaaacacgcgcguacucaacgaacuaaacuacgacaacgccggaacaaaccucuacaacgaacuagaaaugaacuacuacggcaaacaagaaaacugguacucccuaaaaaaaaacucaagaucccuaggcgagaaugacgacggcaacaacgaagacaacgaaaaacuccgcaaacccaaacacaaaaaacucaaacaacccgccgacggaaacccagacccaaacgccaacccaaacgucgacccaaacgcaaaccccaacguagaccccaacgcaaacccaaacguagacccaaacgcaaacccaaacgcaaacccaaacgcaaaccccaacgccaacccaaacgcaaacccaaacgccaauccaaacgcaaacccaaaugccaacccaaacgcaaacccaaacgcaaacccaaacgccaaccccaacgcaaacccaaacgcaaacccaaacgccaacccaaacgcaaacccaaacgcaaaccccaacgccaacccgaacguagaccccaacgcaaaccccaacgcaaacccaaacgccaauccaaacgcaaaccccaacgcaaaccccaacgcaaaccccaacgccaauccaaacgccaaccccaacgcgaacccgaacgcaaacccaaacgcaaacccaaacgcaaacccaaacgcaaacccaaacgcaaacccaaacgcaaacccgaacgcaaaccccaacgccaacccaaacgcaaacccagccgcauacgaacccucagacaaacacauaaaagaauaccuaaacaaaauccaaaacucacucgcugccuacaucaaaccaggaagcgcaaacaaacccaaagacgaacucgauuacgccaacgacaucgaaaaaaaaaucugcaaaauggaaaaaugcuccgccgccuacgcaaaauucgucgcagccuggacucuaaaagccgccgcagccgcauaccaauacauaaaagccaacucaaaauucaucggaaucaccgaacuguaa

SEQ ID NO: 8855 - RNA, 1047 nt, Artificial Sequence
  derived and/or modified CDS sequence (opt11) from Pf(3D7)__XP_001351122.1__HsALB_Pf-CSP(19-272)_L(AAY)_Pf-CSP(310-3 27)_Linker (AAY)_Pf-CSP(346-397)
augaaaugggucaccuucaucucacuccuguuccuauucucgagcgcauacucccucuuccaagaauaccagugcuacggcucaagcucaaacacacgcguacucaacgaacuaaacuacgacaacgccggaaccaaccucuacaacgaacuagaaaugaacuacuacggcaaacaagagaacugguacucucuaaagaaaaacagcagaucccugggcgagaacgacgacggaaacaacgaagacaacgagaaacuacgcaaacccaaacacaagaaacuaaaacaacccgcagauggaaacccagauccaaacgcaaacccaaacgucgacccuaacgcaaaccccaacguagaccccaacgcaaaccccaacguagacccaaacgccaacccaaacgccaacccaaacgccaacccgaacgcaaaccccaaugccaacccaaacgccaacccgaacgccaacccaaacgcgaaccccaacgccaacccaaacgcaaacccaaacgcaaacccuaacgcaaaccccaacgccaacccaaaugccaacccaaacgcaaacccaaacgcaaacccaaacgccaaccccaacguagacccaaacgcaaaccccaacgcaaacccaaacgcaaacccaaacgccaacccaaacgcaaacccaaacgcaaacccaaacgcaaacccgaacgccaaccccaacgcaaacccaaacgcaaacccaaacgccaacccaaacgccaacccaaacgcaaaccccaacgcaaaccccaacgccaaccccaacgccaacccaaacgcaaacccaaacgcaaacccagccgcauacgaacccucagacaaacacauaaaagaauaccucaauaaaauccaaaacucacuugcagccuacauaaaaccaggcagcgcgaacaaacccaaagacgaacucgacuacgcgaacgacauagaaaagaaaaucugcaaaauggaaaaaugcucauccgucuucaaugucguaaacucauccauaggccuaaucaugguccucuccuuccuauuccucaacuaa

SEQ ID NO: 8856 - RNA, 1923 nt, Artificial Sequence
  mRNA Design a-1 (A64-N5-C30-hSL-N5) comprising derived and/or modified sequence from Pf(3D7)__XP_001351122.1__LumSynt_L(GGS4-GGG)_Pf-CSP(19-397) (opt1) R8782
aggagagucccgcagucggcguccagcggcucugcuuguucgugugugugucguugcaggccuuauucaagcuuaccaugcagaucuacgagggcaagcugaccgccgaggggcuccgcuucggcaucguggccagccgguucaaccacgcgcuggucgaccgccugguggagggggccaucgacgccaucgugcggcacggcgggcgcgaggaggacaucacccucguccgggugcccggcuccugggagaucccgguggccgccggcgagcuggcccgcaaggaggacaucgacgcggucaucgccaucggggugcugauccggggcgccacgccccacuucgacuacaucgccagcgagguguccaaggggcucgcggaccugagccuggagcuccgcaagcccaucaccuucggcgucaucaccgccgacacccuggagcaggccaucgagcgggccgggacgaagcacggcaacaagggcugggaggccgcgcuguccgccaucgagauggccaaccucuucaagagccugcgcggcgggagcggcggguccggcgggagcggcggcuccgggggcgggcuguuccaggaguaccagugcuacggcuccagcuccaacacccgggugcucaacgagcugaacuacgacaacgcggggaccaaccuguacaacgagcucgagaugaacuacuacggcaagcaggagaacugguacagccugaagaagaacucccgcagccugggggagaacgacgacggcaacaacgaggacaacgagaagcuccggaagcccaagcacaagaagcugaagcagccggccgacgggaaccccgaccccaacgccaaccccaacguggacccgaacgccaaccccaacgucgaccccaacgccaaccccaacguggacccgaacgcgaaccccaacgccaaccccaacgccaaccccaacgccaacccgaacgcgaaccccaacgccaaccccaacgccaaccccaacgccaacccgaacgccaaccccaacgcgaaccccaacgccaaccccaacgccaacccgaacgccaaccccaacgccaaccccaacgcgaaccccaacgccaacccgaacgccaaccccaacguggaccccaacgccaaccccaacgccaacccgaacgcgaaccccaacgccaaccccaacgccaacccgaacgccaaccccaacgccaaccccaacgcgaaccccaacgccaacccgaacgccaaccccaacgccaaccccaacgcgaaccccaacgccaacccgaacgccaaccccaacgccaaccccaacgccaaccccaacgcgaacccgaacgccaaccccaacaagaacaaccagggcaacggccaggggcacaacaugcccaacgaccccaaccgcaacgucgacgagaacgccaacgccaacuccgccgugaagaacaacaacaacgaggagccgagcgacaagcacaucaaggaguaccugaacaagauccagaacucccucagcacggaguggucccccugcagcgugaccugcggcaacgggauccagguccggaucaagcccggcuccgcgaacaagcccaaggacgagcuggacuacgccaacgacaucgagaagaagaucugcaagauggagaagugcagcuccguguucaacguggucaacagcuccaucgggcugaucauggugcucagcuuccuguuccugaacugaggacuagucccuguucccagagcccacuuuuuuuucuuuuuuugaaauaaaauagccugucuuucagaucuaaaaaaaaaaaaaaaaaaaaaaaaaaaaaaaaaaaaaaaaaaaaaaaaaaaaaaaaaaaaaaaaugcaucccccccccccccccccccccccccccccccaaaggcucuuuucagagccaccagaauu

SEQ ID NO: 8857 - RNA, 1470 nt, Artificial Sequence
  mRNA Design a-1 (A64-N5-C30-hSL-N5) comprising derived and/or modified sequence from Pf(3D7)__XP_001351122.1__HsALB_Pf-CSP(19-397) (opt1)
aggagagucccgcagucggcguccagcggcucugcuuguucgugugugugucguugcaggccuuauucaagcuuaccaugaagugggugaccuucaucagccuccuguuccuguucuccagcgccuacucccuguuccaggaguaccagugcuacggcuccagcuccaacacccgggugcucaacgagcugaacuacgacaacgcggggaccaaccuguacaacgagcucgagaugaacuacuacggcaagcaggagaacugguacagccugaagaagaacucccgcagccugggggagaacgacgacggcaacaacgaggacaacgagaagcuccggaagcccaagcacaagaagcugaagcagccggccgacgggaaccccgaccccaacgccaaccccaacguggacccgaacgccaaccccaacgucgaccccaacgccaaccccaacguggacccgaacgcgaaccccaacgccaaccccaacgccaaccccaacgccaacccgaacgcgaaccccaacgccaaccccaacgccaaccccaacgccaacccgaacgccaaccccaacgcgaaccccaacgccaaccccaacgccaacccgaacgccaaccccaacgccaaccccaacgcgaaccccaacgccaacccgaacgccaaccccaacguggaccccaacgccaaccccaacgccaacccgaacgcgaaccccaacgccaaccccaacgccaacccgaacgccaaccccaacgccaaccccaacgcgaaccccaacgccaacccgaacgccaaccccaacgccaaccccaacgcgaaccccaacgccaacccgaacgccaaccccaacgccaaccccaacgccaaccccaacgcgaacccgaacgccaaccccaacaagaacaaccagggcaacggccaggggcacaacaugcccaacgaccccaaccgcaacgucgacgagaacgccaacgccaacuccgccgugaagaacaacaacaacgaggagccgagcgacaagcacaucaaggaguaccugaacaagauccagaacucccucagcacggaguggucccccugcagcgugaccugcggcaacgggauccagguccggaucaagcccggcuccgcgaacaagcccaaggacgagcuggacuacgccaacgacaucgagaagaagaucugcaagauggagaagugcagcuccguguucaacguggucaacagcuccaucgggcugaucauggugcucagcuuccuguuccugaacugaggacuagucccuguucccagagcccacuuuuuuuucuuuuuuugaaauaaaauagccugucuuucagaucuaaaaaaaaaaaaaaaaaaaaaaaaaaaaaaaaaaaaaaaaaaaaaaaaaaaaaaaaaaaaaaaaugcaucccccccccccccccccccccccccccccccaaaggcucuuuucagagccaccagaauu

SEQ ID NO: 8858 - RNA, 1785 nt, Artificial Sequence
  mRNA Design a-1 (A64-N5-C30-hSL-N5) comprising derived and/or modified sequence from Pf(3D7)__XP_001351122.1__HsALB_Pf-CSP(19-272)_L(PVTN)_HBsAg (opt1) R8567
aggagagucccgcagucggcguccagcggcucugcuuguucgugugugugucguugcaggccuuauucaagcuuaccaugaagugggugaccuucaucagccugcucuuccuguucuccagcgccuacucccuguuccaggaguaccagugcuacggcuccagcuccaacacccgggugcucaacgagcugaacuacgacaacgcggggaccaaccuguacaacgagcucgagaugaacuacuacggcaagcaggagaacugguacagccugaagaagaacucccgcagccugggggagaacgacgacggcaacaacgaggacaacgagaagcuccggaagcccaagcacaagaagcugaagcagccggccgacgggaaccccgaccccaacgccaaccccaacguggacccgaacgccaaccccaacgucgaccccaacgccaaccccaacguggacccgaacgcgaaccccaacgccaaccccaacgccaaccccaacgccaacccgaacgcgaaccccaacgccaaccccaacgccaaccccaacgccaacccgaacgccaaccccaacgcgaaccccaacgccaaccccaacgccaacccgaacgccaaccccaacgccaaccccaacgcgaaccccaacgccaacccgaacgccaaccccaacguggaccccaacgccaaccccaacgccaacccgaacgcgaaccccaacgccaaccccaacgccaacccgaacgccaaccccaacgccaaccccaacgcgaaccccaacgccaacccgaacgccaaccccaacgccaaccccaacgcgaaccccaacgccaacccgaacgccaaccccaacgccaaccccaacgccaaccccaacgcgaacccgaacgccaaccccccggugacgaacauggagaacaucaccagcggcuuccuggggccccuccuggugcugcaggccggcuucuuccuccugacccgcauccugaccaucccgcagucccucgacagcugguggaccucccugaacuuccucgggggcagccccgucugccuggggcagaacucccagagccccaccuccaaccacagccccaccuccugcccgcccaucugccccggcuaccgguggaugugccugcgccgguucaucaucuuccuguucauccuccugcugugccucaucuuccugcuggugcuccuggacuaccagggcaugcugcccgugugcccgcucauccccgggagcacgaccaccaacaccggccccugcaagacgugcaccacccccgcccaggggaacuccauguucccgagcugcugcugcaccaagcccacggacggcaacugcacgugcauccccauccccuccagcugggcguucgccaaguaccugugggagugggccuccguccgcuucagcuggcugucccuccuggugccguucgugcagugguucgucgggcugagccccaccguguggcucuccgccaucuggaugaugugguacuggggccccagccuguacagcaucgugucccccuucaucccgcugcuccccaucuucuucugccugugggucuacaucugaggacuagucccuguucccagagcccacuuuuuuuucuuuuuuugaaauaaaauagccugucuuucagaucuaaaaaaaaaaaaaaaaaaaaaaaaaaaaaaaaaaaaaaaaaaaaaaaaaaaaaaaaaaaaaaaaugcaucccccccccccccccccccccccccccccccaaaggcucuuuucagagccaccagaauu

SEQ ID NO: 8859 - RNA, 1902 nt, Artificial Sequence
  mRNA Design a-1 (A64-N5-C30-hSL-N5) comprising derived and/or modified sequence from Pf(3D7)__XP_001351122.1__HsALB_Pf-CSP(19-272)_L(AAY)_Pf-CSP(346-3 65)_L(AAY)_PADRE_L(PVTN)_HBsAg (opt1) R8571
aggagagucccgcagucggcguccagcggcucugcuuguucgugugugugucguugcaggccuuauucaagcuuaccaugaagugggugaccuucaucagccugcucuuccuguucuccagcgccuacucccuguuccaggaguaccagugcuacggcuccagcuccaacacccgggugcucaacgagcugaacuacgacaacgcggggaccaaccuguacaacgagcucgagaugaacuacuacggcaagcaggagaacugguacagccugaagaagaacucccgcagccugggggagaacgacgacggcaacaacgaggacaacgagaagcuccggaagcccaagcacaagaagcugaagcagccggccgacgggaaccccgaccccaacgccaaccccaacguggacccgaacgccaaccccaacgucgaccccaacgccaaccccaacguggacccgaacgcgaaccccaacgccaaccccaacgccaaccccaacgccaacccgaacgcgaaccccaacgccaaccccaacgccaaccccaacgccaacccgaacgccaaccccaacgcgaaccccaacgccaaccccaacgccaacccgaacgccaaccccaacgccaaccccaacgcgaaccccaacgccaacccgaacgccaaccccaacguggaccccaacgccaaccccaacgccaacccgaacgcgaaccccaacgccaaccccaacgccaacccgaacgccaaccccaacgccaaccccaacgcgaaccccaacgccaacccgaacgccaaccccaacgccaaccccaacgcgaaccccaacgccaacccgaacgccaaccccaacgccaaccccaacgccaaccccaacgcgaacccgaacgccaaccccgccgcguauaucaagcccggcuccgcgaacaagcccaaggacgagcuggacuacgccaacgacaucgaggcggccuacgccaaguucguggccgccuggacccugaaggcggccgccccggugacgaacauggagaacaucaccagcggcuuccuggggccccuccuggugcugcaggccggcuucuuccuccugacccgcauccugaccaucccgcagucccucgacagcugguggaccucccugaacuuccucgggggcagccccgucugccuggggcagaacucccagagccccaccuccaaccacagccccaccuccugcccgcccaucugccccggcuaccgguggaugugccugcgccgguucaucaucuuccuguucauccuccugcugugccucaucuuccugcuggugcuccuggacuaccagggcaugcugcccgugugcccgcucauccccgggagcacgaccaccaacaccggccccugcaagacgugcaccacccccgcccaggggaacuccauguucccgagcugcugcugcaccaagcccacggacggcaacugcacgugcauccccauccccuccagcugggcguucgccaaguaccugugggagugggccuccguccgcuucagcuggcugucccuccuggugccguucgugcagugguucgucgggcugagccccaccguguggcucuccgccaucuggaugaugugguacuggggccccagccuguacagcaucgugucccccuucaucccgcugcuccccaucuucuucugccugugggucuacaucugaggacuagucccuguucccagagcccacuuuuuuuucuuuuuuugaaauaaaauagccugucuuucagaucuaaaaaaaaaaaaaaaaaaaaaaaaaaaaaaaaaaaaaaaaaaaaaaaaaaaaaaaaaaaaaaaaugcaucccccccccccccccccccccccccccccccaaaggcucuuuucagagccaccagaauu

SEQ ID NO: 8860 - RNA, 1902 nt, Artificial Sequence
  mRNA Design a-1 (A64-N5-C30-hSL-N5) comprising derived and/or modified sequence from Pf(3D7)__XP_001351122.1__HsALB_Pf-CSP(19-272)_L(AAY)_Pf-CSP(346-3 65)_L(AAY)_PADRE_L(PVTN)_HBsAg (opt1)
aggagagucccgcagucggcguccagcggcucugcuuguucgugugugugucguugcaggccuuauucaagcuuaccaugaagugggugaccuucaucagccuccuguuccuguucuccagcgccuacucccuguuccaggaguaccagugcuacggcuccagcuccaacacccgggugcucaacgagcugaacuacgacaacgcggggaccaaccuguacaacgagcucgagaugaacuacuacggcaagcaggagaacugguacagccugaagaagaacucccgcagccugggggagaacgacgacggcaacaacgaggacaacgagaagcuccggaagcccaagcacaagaagcugaagcagccggccgacgggaaccccgaccccaacgccaaccccaacguggacccgaacgccaaccccaacgucgaccccaacgccaaccccaacguggacccgaacgcgaaccccaacgccaaccccaacgccaaccccaacgccaacccgaacgcgaaccccaacgccaaccccaacgccaaccccaacgccaacccgaacgccaaccccaacgcgaaccccaacgccaaccccaacgccaacccgaacgccaaccccaacgccaaccccaacgcgaaccccaacgccaacccgaacgccaaccccaacguggaccccaacgccaaccccaacgccaacccgaacgcgaaccccaacgccaaccccaacgccaacccgaacgccaaccccaacgccaaccccaacgcgaaccccaacgccaacccgaacgccaaccccaacgccaaccccaacgcgaaccccaacgccaacccgaacgccaaccccaacgccaaccccaacgccaaccccaacgcgaacccgaacgccaaccccgccgcguauaucaagcccggcuccgcgaacaagcccaaggacgagcuggacuacgccaacgacaucgaggcggccuacgccaaguucguggccgccuggacccugaaggcggccgccccggugacgaacauggagaacaucaccagcggcuuccuggggccccuccuggugcugcaggccggcuucuuccuccugacccgcauccugaccaucccgcagucccucgacagcugguggaccucccugaacuuccucgggggcagccccgucugccuggggcagaacucccagagccccaccuccaaccacagccccaccuccugcccgcccaucugccccggcuaccgguggaugugccugcgccgguucaucaucuuccuguucauccuccugcugugccucaucuuccugcuggugcuccuggacuaccagggcaugcugcccgugugcccgcucauccccgggagcacgaccaccaacaccggccccugcaagacgugcaccacccccgcccaggggaacuccauguucccgagcugcugcugcaccaagcccacggacggcaacugcacgugcauccccauccccuccagcugggcguucgccaaguaccugugggagugggccuccguccgcuucagcuggcugucccuccuggugccguucgugcagugguucgucgggcugagccccaccguguggcucuccgccaucuggaugaugugguacuggggccccagccuguacagcaucgugucccccuucaucccgcugcuccccaucuucuucugccugugggucuacaucugaggacuagucccuguucccagagcccacuuuuuuuucuuuuuuugaaauaaaauagccugucuuucagaucuaaaaaaaaaaaaaaaaaaaaaaaaaaaaaaaaaaaaaaaaaaaaaaaaaaaaaaaaaaaaaaaaugcaucccccccccccccccccccccccccccccccaaaggcucuuuucagagccaccagaauu

SEQ ID NO: 8861 - RNA, 2121 nt, Artificial Sequence
  mRNA Design a-1 (A64-N5-C30-hSL-N5) comprising derived and/or modified sequence from Pf(3D7)__XP_001351122.1__HsALB_Pf-CSP(19-384)_L(PVTN)_HBsAg (opt1) R8565
aggagagucccgcagucggcguccagcggcucugcuuguucgugugugugucguugcaggccuuauucaagcuuaccaugaagugggugaccuucaucagccugcucuuccuguucuccagcgccuacucccuguuccaggaguaccagugcuacggcuccagcuccaacacccgggugcucaacgagcugaacuacgacaacgcggggaccaaccuguacaacgagcucgagaugaacuacuacggcaagcaggagaacugguacagccugaagaagaacucccgcagccugggggagaacgacgacggcaacaacgaggacaacgagaagcuccggaagcccaagcacaagaagcugaagcagccggccgacgggaaccccgaccccaacgccaaccccaacguggacccgaacgccaaccccaacgucgaccccaacgccaaccccaacguggacccgaacgcgaaccccaacgccaaccccaacgccaaccccaacgccaacccgaacgcgaaccccaacgccaaccccaacgccaaccccaacgccaacccgaacgccaaccccaacgcgaaccccaacgccaaccccaacgccaacccgaacgccaaccccaacgccaaccccaacgcgaaccccaacgccaacccgaacgccaaccccaacguggaccccaacgccaaccccaacgccaacccgaacgcgaaccccaacgccaaccccaacgccaacccgaacgccaaccccaacgccaaccccaacgcgaaccccaacgccaacccgaacgccaaccccaacgccaaccccaacgcgaaccccaacgccaacccgaacgccaaccccaacgccaaccccaacgccaaccccaacgcgaacccgaacgccaaccccaacaagaacaaccagggcaacggccaggggcacaacaugcccaacgaccccaaccgcaacgucgacgagaacgccaacgccaacuccgccgugaagaacaacaacaacgaggagccgagcgacaagcacaucaaggaguaccugaacaagauccagaacucccucagcacggaguggucccccugcagcgugaccugcggcaacgggauccagguccggaucaagcccggcuccgcgaacaagcccaaggacgagcuggacuacgccaacgacaucgagaagaagaucugcaagauggagaagugcagcuccguguucaacguggucaacagcuccccggugacgaacauggagaacaucaccagcggcuuccuggggccccuccuggugcugcaggccggcuucuuccuccugacccgcauccugaccaucccgcagucccucgacagcugguggaccucccugaacuuccucgggggcagccccgucugccuggggcagaacucccagagccccaccuccaaccacagccccaccuccugcccgcccaucugccccggcuaccgguggaugugccugcgccgguucaucaucuuccuguucauccuccugcugugccucaucuuccugcuggugcuccuggacuaccagggcaugcugcccgugugcccgcucauccccgggagcacgaccaccaacaccggccccugcaagacgugcaccacccccgcccaggggaacuccauguucccgagcugcugcugcaccaagcccacggacggcaacugcacgugcauccccauccccuccagcugggcguucgccaaguaccugugggagugggccuccguccgcuucagcuggcugucccuccuggugccguucgugcagugguucgucgggcugagccccaccguguggcucuccgccaucuggaugaugugguacuggggccccagccuguacagcaucgugucccccuucaucccgcugcuccccaucuucuucugccugugggucuacaucugaggacuagucccuguucccagagcccacuuuuuuuucuuuuuuugaaauaaaauagccugucuuucagaucuaaaaaaaaaaaaaaaaaaaaaaaaaaaaaaaaaaaaaaaaaaaaaaaaaaaaaaaaaaaaaaaaugcaucccccccccccccccccccccccccccccccaaaggcucuuuucagagccaccagaauu

SEQ ID NO: 8862 - RNA, 2121 nt, Artificial Sequence
  mRNA Design a-1 (A64-N5-C30-hSL-N5) comprising derived and/or modified sequence from Pf(3D7)__XP_001351122.1__HsALB_Pf-CSP(19-384)_L(PVTN)_HBsAg (opt1)
aggagagucccgcagucggcguccagcggcucugcuuguucgugugugugucguugcaggccuuauucaagcuuaccaugaagugggugaccuucaucagccuccuguuccuguucuccagcgccuacucccuguuccaggaguaccagugcuacggcuccagcuccaacacccgggugcucaacgagcugaacuacgacaacgcggggaccaaccuguacaacgagcucgagaugaacuacuacggcaagcaggagaacugguacagccugaagaagaacucccgcagccugggggagaacgacgacggcaacaacgaggacaacgagaagcuccggaagcccaagcacaagaagcugaagcagccggccgacgggaaccccgaccccaacgccaaccccaacguggacccgaacgccaaccccaacgucgaccccaacgccaaccccaacguggacccgaacgcgaaccccaacgccaaccccaacgccaaccccaacgccaacccgaacgcgaaccccaacgccaaccccaacgccaaccccaacgccaacccgaacgccaaccccaacgcgaaccccaacgccaaccccaacgccaacccgaacgccaaccccaacgccaaccccaacgcgaaccccaacgccaacccgaacgccaaccccaacguggaccccaacgccaaccccaacgccaacccgaacgcgaaccccaacgccaaccccaacgccaacccgaacgccaaccccaacgccaaccccaacgcgaaccccaacgccaacccgaacgccaaccccaacgccaaccccaacgcgaaccccaacgccaacccgaacgccaaccccaacgccaaccccaacgccaaccccaacgcgaacccgaacgccaaccccaacaagaacaaccagggcaacggccaggggcacaacaugcccaacgaccccaaccgcaacgucgacgagaacgccaacgccaacuccgccgugaagaacaacaacaacgaggagccgagcgacaagcacaucaaggaguaccugaacaagauccagaacucccucagcacggaguggucccccugcagcgugaccugcggcaacgggauccagguccggaucaagcccggcuccgcgaacaagcccaaggacgagcuggacuacgccaacgacaucgagaagaagaucugcaagauggagaagugcagcuccguguucaacguggucaacagcuccccggugacgaacauggagaacaucaccagcggcuuccuggggccccuccuggugcugcaggccggcuucuuccuccugacccgcauccugaccaucccgcagucccucgacagcugguggaccucccugaacuuccucgggggcagccccgucugccuggggcagaacucccagagccccaccuccaaccacagccccaccuccugcccgcccaucugccccggcuaccgguggaugugccugcgccgguucaucaucuuccuguucauccuccugcugugccucaucuuccugcuggugcuccuggacuaccagggcaugcugcccgugugcccgcucauccccgggagcacgaccaccaacaccggccccugcaagacgugcaccacccccgcccaggggaacuccauguucccgagcugcugcugcaccaagcccacggacggcaacugcacgugcauccccauccccuccagcugggcguucgccaaguaccugugggagugggccuccguccgcuucagcuggcugucccuccuggugccguucgugcagugguucgucgggcugagccccaccguguggcucuccgccaucuggaugaugugguacuggggccccagccuguacagcaucgugucccccuucaucccgcugcuccccaucuucuucugccugugggucuacaucugaggacuagucccuguucccagagcccacuuuuuuuucuuuuuuugaaauaaaauagccugucuuucagaucuaaaaaaaaaaaaaaaaaaaaaaaaaaaaaaaaaaaaaaaaaaaaaaaaaaaaaaaaaaaaaaaaugcaucccccccccccccccccccccccccccccccaaaggcucuuuucagagccaccagaauu

SEQ ID NO: 8863 - RNA, 1938 nt, Artificial Sequence
  mRNA Design a-1 (A64-N5-C30-hSL-N5) comprising derived and/or modified sequence from Pf(3D7)__XP_001351122.1__HsALB_Pf-CSP(19-384)_L(SGG)_Ferritin (opt1) R8780
aggagagucccgcagucggcguccagcggcucugcuuguucgugugugugucguugcaggccuuauucaagcuuaccaugaagugggugaccuucaucagccugcucuuccuguucuccagcgccuacucccuguuccaggaguaccagugcuacggcuccagcuccaacacccgggugcucaacgagcugaacuacgacaacgcggggaccaaccuguacaacgagcucgagaugaacuacuacggcaagcaggagaacugguacagccugaagaagaacucccgcagccugggggagaacgacgacggcaacaacgaggacaacgagaagcuccggaagcccaagcacaagaagcugaagcagccggccgacgggaaccccgaccccaacgccaaccccaacguggacccgaacgccaaccccaacgucgaccccaacgccaaccccaacguggacccgaacgcgaaccccaacgccaaccccaacgccaaccccaacgccaacccgaacgcgaaccccaacgccaaccccaacgccaaccccaacgccaacccgaacgccaaccccaacgcgaaccccaacgccaaccccaacgccaacccgaacgccaaccccaacgccaaccccaacgcgaaccccaacgccaacccgaacgccaaccccaacguggaccccaacgccaaccccaacgccaacccgaacgcgaaccccaacgccaaccccaacgccaacccgaacgccaaccccaacgccaaccccaacgcgaaccccaacgccaacccgaacgccaaccccaacgccaaccccaacgcgaaccccaacgccaacccgaacgccaaccccaacgccaaccccaacgccaaccccaacgcgaacccgaacgccaaccccaacaagaacaaccagggcaacggccaggggcacaacaugcccaacgaccccaaccgcaacgucgacgagaacgccaacgccaacuccgccgugaagaacaacaacaacgaggagccgagcgacaagcacaucaaggaguaccugaacaagauccagaacucccucagcacggaguggucccccugcagcgugaccugcggcaacgggauccagguccggaucaagcccggcuccgcgaacaagcccaaggacgagcuggacuacgccaacgacaucgagaagaagaucugcaagauggagaagugcagcuccguguucaacguggucaacagcuccagcggcgggcugagcaaggacaucaucaagcuccugaacgagcaggugaacaaggagaugaacuccagcaaccuguacauguccaugagcuccuggugcuacacccacagccucgacggcgccgggcuguuccuguucgaccacgccgcggaggaguacgagcacgccaagaagcucaucaucuuccugaacgagaacaacguccccgugcagcugaccuccaucagcgccccggagcacaaguucgagggccucacgcagaucuuccagaaggccuacgagcacgagcagcacaucuccgagagcaucaacaacaucguggaccacgccaucaaguccaaggaccacgcgaccuucaacuuccugcagugguacgucgccgagcagcacgaggaggaggugcuguucaaggacauccucgacaagaucgagcugaucgggaacgagaaccacggccuguaccucgccgaccaguacgugaaggggaucgccaagagccgcaaguccugaggacuagucccuguucccagagcccacuuuuuuuucuuuuuuugaaauaaaauagccugucuuucagaucuaaaaaaaaaaaaaaaaaaaaaaaaaaaaaaaaaaaaaaaaaaaaaaaaaaaaaaaaaaaaaaaaugcaucccccccccccccccccccccccccccccccaaaggcucuuuucagagccaccagaauu

SEQ ID NO: 8864 - RNA, 1938 nt, Artificial Sequence
  mRNA Design a-1 (A64-N5-C30-hSL-N5) comprising derived and/or modified sequence from Pf(3D7)__XP_001351122.1__HsALB_Pf-CSP(19-384)_L(SGG)_Ferritin (opt1)
aggagagucccgcagucggcguccagcggcucugcuuguucgugugugugucguugcaggccuuauucaagcuuaccaugaagugggugaccuucaucagccuccuguuccuguucuccagcgccuacucccuguuccaggaguaccagugcuacggcuccagcuccaacacccgggugcucaacgagcugaacuacgacaacgcggggaccaaccuguacaacgagcucgagaugaacuacuacggcaagcaggagaacugguacagccugaagaagaacucccgcagccugggggagaacgacgacggcaacaacgaggacaacgagaagcuccggaagcccaagcacaagaagcugaagcagccggccgacgggaaccccgaccccaacgccaaccccaacguggacccgaacgccaaccccaacgucgaccccaacgccaaccccaacguggacccgaacgcgaaccccaacgccaaccccaacgccaaccccaacgccaacccgaacgcgaaccccaacgccaaccccaacgccaaccccaacgccaacccgaacgccaaccccaacgcgaaccccaacgccaaccccaacgccaacccgaacgccaaccccaacgccaaccccaacgcgaaccccaacgccaacccgaacgccaaccccaacguggaccccaacgccaaccccaacgccaacccgaacgcgaaccccaacgccaaccccaacgccaacccgaacgccaaccccaacgccaaccccaacgcgaaccccaacgccaacccgaacgccaaccccaacgccaaccccaacgcgaaccccaacgccaacccgaacgccaaccccaacgccaaccccaacgccaaccccaacgcgaacccgaacgccaaccccaacaagaacaaccagggcaacggccaggggcacaacaugcccaacgaccccaaccgcaacgucgacgagaacgccaacgccaacuccgccgugaagaacaacaacaacgaggagccgagcgacaagcacaucaaggaguaccugaacaagauccagaacucccucagcacggaguggucccccugcagcgugaccugcggcaacgggauccagguccggaucaagcccggcuccgcgaacaagcccaaggacgagcuggacuacgccaacgacaucgagaagaagaucugcaagauggagaagugcagcuccguguucaacguggucaacagcuccagcggcgggcugagcaaggacaucaucaagcuccugaacgagcaggugaacaaggagaugaacuccagcaaccuguacauguccaugagcuccuggugcuacacccacagccucgacggcgccgggcuguuccuguucgaccacgccgcggaggaguacgagcacgccaagaagcucaucaucuuccugaacgagaacaacguccccgugcagcugaccuccaucagcgccccggagcacaaguucgagggccucacgcagaucuuccagaaggccuacgagcacgagcagcacaucuccgagagcaucaacaacaucguggaccacgccaucaaguccaaggaccacgcgaccuucaacuuccugcagugguacgucgccgagcagcacgaggaggaggugcuguucaaggacauccucgacaagaucgagcugaucgggaacgagaaccacggccuguaccucgccgaccaguacgugaaggggaucgccaagagccgcaaguccugaggacuagucccuguucccagagcccacuuuuuuuucuuuuuuugaaauaaaauagccugucuuucagaucuaaaaaaaaaaaaaaaaaaaaaaaaaaaaaaaaaaaaaaaaaaaaaaaaaaaaaaaaaaaaaaaaugcaucccccccccccccccccccccccccccccccaaaggcucuuuucagagccaccagaauu

SEQ ID NO: 8865 - RNA, 1899 nt, Artificial Sequence
  mRNA Design a-1 (A64-N5-C30-hSL-N5) comprising derived and/or modified sequence from Pf(3D7)__XP_001351122.1__HsALB_Pf-CSP(93-384)_L(PVTN)_HBsAg (opt1) R8573
aggagagucccgcagucggcguccagcggcucugcuuguucgugugugugucguugcaggccuuauucaagcuuaccaugaagugggugaccuucaucagccugcucuuccuguucuccagcgccuacuccaagcugaagcagccggccgacgggaaccccgaccccaacgccaaccccaacguggacccgaacgccaaccccaacgucgaccccaacgccaaccccaacguggacccgaacgcgaaccccaacgccaaccccaacgccaaccccaacgccaacccgaacgcgaaccccaacgccaaccccaacgccaaccccaacgccaacccgaacgccaaccccaacgcgaaccccaacgccaaccccaacgccaacccgaacgccaaccccaacgccaaccccaacgcgaaccccaacgccaacccgaacgccaaccccaacguggaccccaacgccaaccccaacgccaacccgaacgcgaaccccaacgccaaccccaacgccaacccgaacgccaaccccaacgccaaccccaacgcgaaccccaacgccaacccgaacgccaaccccaacgccaaccccaacgcgaaccccaacgccaacccgaacgccaaccccaacgccaaccccaacgccaaccccaacgcgaacccgaacgccaaccccaacaagaacaaccagggcaacggccaggggcacaacaugcccaacgaccccaaccgcaacgucgacgagaacgccaacgccaacuccgccgugaagaacaacaacaacgaggagccgagcgacaagcacaucaaggaguaccugaacaagauccagaacucccucagcacggaguggucccccugcagcgugaccugcggcaacgggauccagguccggaucaagcccggcuccgcgaacaagcccaaggacgagcuggacuacgccaacgacaucgagaagaagaucugcaagauggagaagugcagcuccguguucaacguggucaacagcuccccggugacgaacauggagaacaucaccagcggcuuccuggggccccuccuggugcugcaggccggcuucuuccuccugacccgcauccugaccaucccgcagucccucgacagcugguggaccucccugaacuuccucgggggcagccccgucugccuggggcagaacucccagagccccaccuccaaccacagccccaccuccugcccgcccaucugccccggcuaccgguggaugugccugcgccgguucaucaucuuccuguucauccuccugcugugccucaucuuccugcuggugcuccuggacuaccagggcaugcugcccgugugcccgcucauccccgggagcacgaccaccaacaccggccccugcaagacgugcaccacccccgcccaggggaacuccauguucccgagcugcugcugcaccaagcccacggacggcaacugcacgugcauccccauccccuccagcugggcguucgccaaguaccugugggagugggccuccguccgcuucagcuggcugucccuccuggugccguucgugcagugguucgucgggcugagccccaccguguggcucuccgccaucuggaugaugugguacuggggccccagccuguacagcaucgugucccccuucaucccgcugcuccccaucuucuucugccugugggucuacaucugaggacuagucccuguucccagagcccacuuuuuuuucuuuuuuugaaauaaaauagccugucuuucagaucuaaaaaaaaaaaaaaaaaaaaaaaaaaaaaaaaaaaaaaaaaaaaaaaaaaaaaaaaaaaaaaaaugcaucccccccccccccccccccccccccccccccaaaggcucuuuucagagccaccagaauu

SEQ ID NO: 8866 - RNA, 1899 nt, Artificial Sequence
  mRNA Design a-1 (A64-N5-C30-hSL-N5) comprising derived and/or modified sequence from Pf(3D7)__XP_001351122.1__HsALB_Pf-CSP(93-384)_L(PVTN)_HBsAg (opt1)
aggagagucccgcagucggcguccagcggcucugcuuguucgugugugugucguugcaggccuuauucaagcuuaccaugaagugggugaccuucaucagccuccuguuccuguucuccagcgccuacuccaagcugaagcagccggccgacgggaaccccgaccccaacgccaaccccaacguggacccgaacgccaaccccaacgucgaccccaacgccaaccccaacguggacccgaacgcgaaccccaacgccaaccccaacgccaaccccaacgccaacccgaacgcgaaccccaacgccaaccccaacgccaaccccaacgccaacccgaacgccaaccccaacgcgaaccccaacgccaaccccaacgccaacccgaacgccaaccccaacgccaaccccaacgcgaaccccaacgccaacccgaacgccaaccccaacguggaccccaacgccaaccccaacgccaacccgaacgcgaaccccaacgccaaccccaacgccaacccgaacgccaaccccaacgccaaccccaacgcgaaccccaacgccaacccgaacgccaaccccaacgccaaccccaacgcgaaccccaacgccaacccgaacgccaaccccaacgccaaccccaacgccaaccccaacgcgaacccgaacgccaaccccaacaagaacaaccagggcaacggccaggggcacaacaugcccaacgaccccaaccgcaacgucgacgagaacgccaacgccaacuccgccgugaagaacaacaacaacgaggagccgagcgacaagcacaucaaggaguaccugaacaagauccagaacucccucagcacggaguggucccccugcagcgugaccugcggcaacgggauccagguccggaucaagcccggcuccgcgaacaagcccaaggacgagcuggacuacgccaacgacaucgagaagaagaucugcaagauggagaagugcagcuccguguucaacguggucaacagcuccccggugacgaacauggagaacaucaccagcggcuuccuggggccccuccuggugcugcaggccggcuucuuccuccugacccgcauccugaccaucccgcagucccucgacagcugguggaccucccugaacuuccucgggggcagccccgucugccuggggcagaacucccagagccccaccuccaaccacagccccaccuccugcccgcccaucugccccggcuaccgguggaugugccugcgccgguucaucaucuuccuguucauccuccugcugugccucaucuuccugcuggugcuccuggacuaccagggcaugcugcccgugugcccgcucauccccgggagcacgaccaccaacaccggccccugcaagacgugcaccacccccgcccaggggaacuccauguucccgagcugcugcugcaccaagcccacggacggcaacugcacgugcauccccauccccuccagcugggcguucgccaaguaccugugggagugggccuccguccgcuucagcuggcugucccuccuggugccguucgugcagugguucgucgggcugagccccaccguguggcucuccgccaucuggaugaugugguacuggggccccagccuguacagcaucgugucccccuucaucccgcugcuccccaucuucuucugccugugggucuacaucugaggacuagucccuguucccagagcccacuuuuuuuucuuuuuuugaaauaaaauagccugucuuucagaucuaaaaaaaaaaaaaaaaaaaaaaaaaaaaaaaaaaaaaaaaaaaaaaaaaaaaaaaaaaaaaaaaugcaucccccccccccccccccccccccccccccccaaaggcucuuuucagagccaccagaauu

SEQ ID NO: 8867 - RNA, 1560 nt, Artificial Sequence; identical to SEQ ID NO: 654
  mRNA Design a-1 (A64-N5-C30-hSL-N5) comprising derived and/or modified sequence from Pf(3D7)__XP_001351122.1__HsALB_Pf-CSP(199-377)_L(PVTN)_HBsAg (opt1)

SEQ ID NO: 8868 - RNA, 1257 nt, Artificial Sequence
  mRNA Design a-1 (A64-N5-C30-hSL-N5) comprising derived and/or modified sequence from Pf(3D7)__XP_001351122.1__HsALB_Pf-CSP(19-272)_L(AAY)_Pf-CSP(310-3 27)_L(AAY)_Pf-CSP(346-375) (opt1)
aggagagucccgcagucggcguccagcggcucugcuuguucgugugugugucguugcaggccuuauucaagcuuaccaugaagugggugaccuucaucagccuccuguuccuguucuccagcgccuacucccuguuccaggaguaccagugcuacggcuccagcuccaacacccgggugcucaacgagcugaacuacgacaacgcggggaccaaccuguacaacgagcucgagaugaacuacuacggcaagcaggagaacugguacagccugaagaagaacucccgcagccugggggagaacgacgacggcaacaacgaggacaacgagaagcuccggaagcccaagcacaagaagcugaagcagccggccgacgggaaccccgaccccaacgccaaccccaacguggacccgaacgccaaccccaacgucgaccccaacgccaaccccaacguggacccgaacgcgaaccccaacgccaaccccaacgccaaccccaacgccaacccgaacgcgaaccccaacgccaaccccaacgccaaccccaacgccaacccgaacgccaaccccaacgcgaaccccaacgccaaccccaacgccaacccgaacgccaaccccaacgccaaccccaacgcgaaccccaacgccaacccgaacgccaaccccaacguggaccccaacgccaaccccaacgccaacccgaacgcgaaccccaacgccaaccccaacgccaacccgaacgccaaccccaacgccaaccccaacgcgaaccccaacgccaacccgaacgccaaccccaacgccaaccccaacgcgaaccccaacgccaacccgaacgccaaccccaacgccaaccccaacgccaaccccaacgcgaacccgaacgccaaccccgccgcguaugagccgagcgacaagcacaucaaggaguaccugaacaagauccagaacucccucgcggccuacaucaagcccggcuccgcgaacaagcccaaggacgagcuggacuacgccaacgacaucgagaagaagaucugcaagauggagaagugcagcugaggacuagucccuguucccagagcccacuuuuuuuucuuuuuuugaaauaaaauagccugucuuucagaucuaaaaaaaaaaaaaaaaaaaaaaaaaaaaaaaaaaaaaaaaaaaaaaaaaaaaaaaaaaaaaaaaugcaucccccccccccccccccccccccccccccccaaaggcucuuuucagagccaccagaauu

SEQ ID NO: 8869 - RNA, 1257 nt, Artificial Sequence
  mRNA Design a-1 (A64-N5-C30-hSL-N5) comprising derived and/or modified sequence from Pf(3D7)__XP_001351122.1__HsALB_Pf-CSP(19-272)_L(AAY)_Pf-CSP(346-3 75)_L(AAY)_Pf-CSP(310-327) (opt1)
aggagagucccgcagucggcguccagcggcucugcuuguucgugugugugucguugcaggccuuauucaagcuuaccaugaagugggugaccuucaucagccuccuguuccuguucuccagcgccuacucccuguuccaggaguaccagugcuacggcuccagcuccaacacccgggugcucaacgagcugaacuacgacaacgcggggaccaaccuguacaacgagcucgagaugaacuacuacggcaagcaggagaacugguacagccugaagaagaacucccgcagccugggggagaacgacgacggcaacaacgaggacaacgagaagcuccggaagcccaagcacaagaagcugaagcagccggccgacgggaaccccgaccccaacgccaaccccaacguggacccgaacgccaaccccaacgucgaccccaacgccaaccccaacguggacccgaacgcgaaccccaacgccaaccccaacgccaaccccaacgccaacccgaacgcgaaccccaacgccaaccccaacgccaaccccaacgccaacccgaacgccaaccccaacgcgaaccccaacgccaaccccaacgccaacccgaacgccaaccccaacgccaaccccaacgcgaaccccaacgccaacccgaacgccaaccccaacguggaccccaacgccaaccccaacgccaacccgaacgcgaaccccaacgccaaccccaacgccaacccgaacgccaaccccaacgccaaccccaacgcgaaccccaacgccaacccgaacgccaaccccaacgccaaccccaacgcgaaccccaacgccaacccgaacgccaaccccaacgccaaccccaacgccaaccccaacgcgaacccgaacgccaaccccgcggccuacaucaagcccggcuccgcgaacaagcccaaggacgagcuggacuacgccaacgacaucgagaagaagaucugcaagauggagaagugcagcgccgcguaugagccgagcgacaagcacaucaaggaguaccugaacaagauccagaacucccucugaggacuagucccuguucccagagcccacuuuuuuuucuuuuuuugaaauaaaauagccugucuuucagaucuaaaaaaaaaaaaaaaaaaaaaaaaaaaaaaaaaaaaaaaaaaaaaaaaaaaaaaaaaaaaaaaaugcaucccccccccccccccccccccccccccccccaaaggcucuuuucagagccaccagaauu

SEQ ID NO: 8870 - RNA, 1305 nt, Artificial Sequence
  mRNA Design a-1 (A64-N5-C30-hSL-N5) comprising derived and/or modified sequence from Pf(3D7)__XP_001351122.1__HsALB_Pf-CSP(19-272)_L(AAY)_Pf-CSP(346-3 75)_L(AAY)_Pf-CSP(310-327)_L(AAY)_PADRE (opt1)
aggagagucccgcagucggcguccagcggcucugcuuguucgugugugugucguugcaggccuuauucaagcuuaccaugaagugggugaccuucaucagccuccuguuccuguucuccagcgccuacucccuguuccaggaguaccagugcuacggcuccagcuccaacacccgggugcucaacgagcugaacuacgacaacgcggggaccaaccuguacaacgagcucgagaugaacuacuacggcaagcaggagaacugguacagccugaagaagaacucccgcagccugggggagaacgacgacggcaacaacgaggacaacgagaagcuccggaagcccaagcacaagaagcugaagcagccggccgacgggaaccccgaccccaacgccaaccccaacguggacccgaacgccaaccccaacgucgaccccaacgccaaccccaacguggacccgaacgcgaaccccaacgccaaccccaacgccaaccccaacgccaacccgaacgcgaaccccaacgccaaccccaacgccaaccccaacgccaacccgaacgccaaccccaacgcgaaccccaacgccaaccccaacgccaacccgaacgccaaccccaacgccaaccccaacgcgaaccccaacgccaacccgaacgccaaccccaacguggaccccaacgccaaccccaacgccaacccgaacgcgaaccccaacgccaaccccaacgccaacccgaacgccaaccccaacgccaaccccaacgcgaaccccaacgccaacccgaacgccaaccccaacgccaaccccaacgcgaaccccaacgccaacccgaacgccaaccccaacgccaaccccaacgccaaccccaacgcgaacccgaacgccaaccccgccgcguauaucaagcccggcuccgcgaacaagcccaaggacgagcuggacuacgccaacgacaucgagaagaagaucugcaagauggagaagugcagcgcggccuacgagccgagcgacaagcacaucaaggaguaccugaacaagauccagaacucccucgccgccuacgccaaguucguggccgccuggacccugaaggcggccgccugaggacuagucccuguucccagagcccacuuuuuuuucuuuuuuugaaauaaaauagccugucuuucagaucuaaaaaaaaaaaaaaaaaaaaaaaaaaaaaaaaaaaaaaaaaaaaaaaaaaaaaaaaaaaaaaaaugcaucccccccccccccccccccccccccccccccaaaggcucuuuucagagccaccagaauu

SEQ ID NO: 8871 - RNA, 1305 nt, Artificial Sequence
  mRNA Design a-1 (A64-N5-C30-hSL-N5) comprising derived and/or modified sequence from Pf(3D7)__XP_001351122.1__HsALB_Pf-CSP(19-272)_L(AAY)_Pf-CSP(310-3 27)_L(AAY)_Pf-CSP(346-375)_L(AAY)_PADRE (opt1)
aggagagucccgcagucggcguccagcggcucugcuuguucgugugugugucguugcaggccuuauucaagcuuaccaugaagugggugaccuucaucagccuccuguuccuguucuccagcgccuacucccuguuccaggaguaccagugcuacggcuccagcuccaacacccgggugcucaacgagcugaacuacgacaacgcggggaccaaccuguacaacgagcucgagaugaacuacuacggcaagcaggagaacugguacagccugaagaagaacucccgcagccugggggagaacgacgacggcaacaacgaggacaacgagaagcuccggaagcccaagcacaagaagcugaagcagccggccgacgggaaccccgaccccaacgccaaccccaacguggacccgaacgccaaccccaacgucgaccccaacgccaaccccaacguggacccgaacgcgaaccccaacgccaaccccaacgccaaccccaacgccaacccgaacgcgaaccccaacgccaaccccaacgccaaccccaacgccaacccgaacgccaaccccaacgcgaaccccaacgccaaccccaacgccaacccgaacgccaaccccaacgccaaccccaacgcgaaccccaacgccaacccgaacgccaaccccaacguggaccccaacgccaaccccaacgccaacccgaacgcgaaccccaacgccaaccccaacgccaacccgaacgccaaccccaacgccaaccccaacgcgaaccccaacgccaacccgaacgccaaccccaacgccaaccccaacgcgaaccccaacgccaacccgaacgccaaccccaacgccaaccccaacgccaaccccaacgcgaacccgaacgccaaccccgccgcguaugagccgagcgacaagcacaucaaggaguaccugaacaagauccagaacucccucgcggccuacaucaagcccggcuccgcgaacaagcccaaggacgagcuggacuacgccaacgacaucgagaagaagaucugcaagauggagaagugcagcgccgccuacgccaaguucguggccgccuggacccugaaggcggccgccugaggacuagucccuguucccagagcccacuuuuuuuucuuuuuuugaaauaaaauagccugucuuucagaucuaaaaaaaaaaaaaaaaaaaaaaaaaaaaaaaaaaaaaaaaaaaaaaaaaaaaaaaaaaaaaaaaugcaucccccccccccccccccccccccccccccccaaaggcucuuuucagagccaccagaauu

SEQ ID NO: 8872 - RNA, 1359 nt, Artificial Sequence
  mRNA Design a-1 (A64-N5-C30-hSL-N5) comprising derived and/or modified sequence from Pf(3D7)__XP_001351122.1__HsALB_Pf-CSP(19-272)_L(AAY)_Pf-CSP(310-3 27)_L(AAY)_Pf-CSP(346-375)_L(AAY)_PADRE_L(AAY)_P2 (opt1)
aggagagucccgcagucggcguccagcggcucugcuuguucgugugugugucguugcaggccuuauucaagcuuaccaugaagugggugaccuucaucagccuccuguuccuguucuccagcgccuacucccuguuccaggaguaccagugcuacggcuccagcuccaacacccgggugcucaacgagcugaacuacgacaacgcggggaccaaccuguacaacgagcucgagaugaacuacuacggcaagcaggagaacugguacagccugaagaagaacucccgcagccugggggagaacgacgacggcaacaacgaggacaacgagaagcuccggaagcccaagcacaagaagcugaagcagccggccgacgggaaccccgaccccaacgccaaccccaacguggacccgaacgccaaccccaacgucgaccccaacgccaaccccaacguggacccgaacgcgaaccccaacgccaaccccaacgccaaccccaacgccaacccgaacgcgaaccccaacgccaaccccaacgccaaccccaacgccaacccgaacgccaaccccaacgcgaaccccaacgccaaccccaacgccaacccgaacgccaaccccaacgccaaccccaacgcgaaccccaacgccaacccgaacgccaaccccaacguggaccccaacgccaaccccaacgccaacccgaacgcgaaccccaacgccaaccccaacgccaacccgaacgccaaccccaacgccaaccccaacgcgaaccccaacgccaacccgaacgccaaccccaacgccaaccccaacgcgaaccccaacgccaacccgaacgccaaccccaacgccaaccccaacgccaaccccaacgcgaacccgaacgccaaccccgcggccuacgagccgagcgacaagcacaucaaggaguaccugaacaagauccagaacucccucgccgcguauaucaagcccggcuccgcgaacaagcccaaggacgagcuggacuacgccaacgacaucgagaagaagaucugcaagauggagaagugcagcgccgccuacgccaaguucguggccgccuggacccugaaggcggccgccgccgcuuaccaguacaucaaggccaacagcaaguucaucggcaucaccgagcugugaggacuagucccuguucccagagcccacuuuuuuuucuuuuuuugaaauaaaauagccugucuuucagaucuaaaaaaaaaaaaaaaaaaaaaaaaaaaaaaaaaaaaaaaaaaaaaaaaaaaaaaaaaaaaaaaaugcaucccccccccccccccccccccccccccccccaaaggcucuuuucagagccaccagaauu

SEQ ID NO: 8873 - RNA, 1323 nt, Artificial Sequence
  mRNA Design a-1 (A64-N5-C30-hSL-N5) comprising derived and/or modified sequence from Pf(3D7)__XP_001351122.1__HsALB_Pf-CSP(19-272)_L(AAY)_Pf-CSP(310-3 27)_Linker (AAY)_Pf-CSP(346-397) (opt1)
aggagagucccgcagucggcguccagcggcucugcuuguucgugugugugucguugcaggccuuauucaagcuuaccaugaagugggugaccuucaucagccuccuguuccuguucuccagcgccuacucccuguuccaggaguaccagugcuacggcuccagcuccaacacccgggugcucaacgagcugaacuacgacaacgcggggaccaaccuguacaacgagcucgagaugaacuacuacggcaagcaggagaacugguacagccugaagaagaacucccgcagccugggggagaacgacgacggcaacaacgaggacaacgagaagcuccggaagcccaagcacaagaagcugaagcagccggccgacgggaaccccgaccccaacgccaaccccaacguggacccgaacgccaaccccaacgucgaccccaacgccaaccccaacguggacccgaacgcgaaccccaacgccaaccccaacgccaaccccaacgccaacccgaacgcgaaccccaacgccaaccccaacgccaaccccaacgccaacccgaacgccaaccccaacgcgaaccccaacgccaaccccaacgccaacccgaacgccaaccccaacgccaaccccaacgcgaaccccaacgccaacccgaacgccaaccccaacguggaccccaacgccaaccccaacgccaacccgaacgcgaaccccaacgccaaccccaacgccaacccgaacgccaaccccaacgccaaccccaacgcgaaccccaacgccaacccgaacgccaaccccaacgccaaccccaacgcgaaccccaacgccaacccgaacgccaaccccaacgccaaccccaacgccaaccccaacgcgaacccgaacgccaaccccgcggccuacgagccgagcgacaagcacaucaaggaguaccugaacaagauccagaacucccucgccgcguauaucaagcccggcuccgcgaacaagcccaaggacgagcuggacuacgccaacgacaucgagaagaagaucugcaagauggagaagugcagcuccguguucaacguggucaacagcuccaucgggcugaucauggugcucagcuuccuguuccugaacugaggacuagucccuguucccagagcccacuuuuuuuucuuuuuuugaaauaaaauagccugucuuucagaucuaaaaaaaaaaaaaaaaaaaaaaaaaaaaaaaaaaaaaaaaaaaaaaaaaaaaaaaaaaaaaaaaugcaucccccccccccccccccccccccccccccccaaaggcucuuuucagagccaccagaauu

SEQ ID NO: 8874 - RNA, 1923 nt, Artificial Sequence
  mRNA Design a-1 (A64-N5-C30-hSL-N5) comprising derived and/or modified sequence from Pf(3D7)__XP_001351122.1__LumSynt_L(GGS4-GGG)_Pf-CSP(19-397) (opt1)
aggagagucccgcagucggcguccagcggcucugcuuguucgugugugugucguugcaggccuuauucaagcuuaccaugcagaucuacgagggcaagcugaccgccgaggggcuccgcuucggcaucguggccagccgguucaaccacgcgcuggucgaccgccugguggagggggccaucgacgccaucgugcggcacggcgggcgcgaggaggacaucacccucguccgggugcccggcuccugggagaucccgguggccgccggcgagcuggcgcgcaaggaggacaucgacgccgucaucgccaucggggugcugauccggggcgccacgccccacuucgacuacaucgcgagcgagguguccaaggggcucgccgaccugagccuggagcuccgcaagcccaucaccuucggcgucaucaccgccgacacccuggagcaggccaucgagcgggccgggacgaagcacggcaacaagggcugggaggcggcccuguccgccaucgagauggccaaccucuucaagagccugcgcgggggcuccgggggcagcggcggguccggcgggagcggcgggggccuguuccaggaguaccagugcuacggcuccagcuccaacacccgggugcucaacgagcugaacuacgacaacgccgggaccaaccuguacaacgagcucgagaugaacuacuacggcaagcaggagaacugguacagccugaagaagaacucccgcagccugggggagaacgacgacggcaacaacgaggacaacgagaagcuccggaagcccaagcacaagaagcugaagcagccggcggacgggaaccccgaccccaacgccaaccccaacguggacccgaacgccaaccccaacgucgaccccaacgccaaccccaacguggacccgaacgccaaccccaacgcgaaccccaacgccaaccccaacgccaacccgaacgccaaccccaacgccaaccccaacgcgaaccccaacgccaacccgaacgccaaccccaacgccaaccccaacgcgaaccccaacgccaacccgaacgccaaccccaacgccaaccccaacgccaaccccaacgcgaacccgaacgccaaccccaacguggaccccaacgccaacccgaacgccaaccccaacgccaaccccaacgcgaaccccaacgccaacccgaacgccaaccccaacgccaaccccaacgccaaccccaacgcgaacccgaacgccaaccccaacgccaaccccaacgccaaccccaacgcgaacccgaacgccaaccccaacgccaaccccaacgccaaccccaacgccaacccgaacgcgaaccccaacaagaacaaccagggcaacggccaggggcacaacaugcccaacgaccccaaccgcaacgucgacgagaacgccaacgccaacuccgccgugaagaacaacaacaacgaggagccgagcgacaagcacaucaaggaguaccugaacaagauccagaacucccucagcaccgaguggagccccugcuccgugacgugcggcaacgggauccagguccggaucaagcccggcagcgccaacaagcccaaggacgagcuggacuacgcgaacgacaucgagaagaagaucugcaagauggagaagugcuccagcguguucaacguggucaacuccagcaucgggcugaucauggugcucuccuuccuguuccugaacugaggacuagucccuguucccagagcccacuuuuuuuucuuuuuuugaaauaaaauagccugucuuucagaucuaaaaaaaaaaaaaaaaaaaaaaaaaaaaaaaaaaaaaaaaaaaaaaaaaaaaaaaaaaaaaaaaugcaucccccccccccccccccccccccccccccccaaaggcucuuuucagagccaccagaauu

SEQ ID NO: 8875 - RNA, 1785 nt, Artificial Sequence
  mRNA Design a-1 (A64-N5-C30-hSL-N5) comprising derived and/or modified sequence from Pf(3D7)__XP_001351122.1__HsALB_Pf-CSP(19-272)_L(PVTN)_HBsAg (opt1)
aggagagucccgcagucggcguccagcggcucugcuuguucgugugugugucguugcaggccuuauucaagcuuaccaugaagugggugaccuucaucagccuccuguuccuguucuccagcgccuacucccuguuccaggaguaccagugcuacggcagcuccagcaacacccgcguccucaacgagcugaacuacgacaacgccgggaccaaccuguacaacgagcucgagaugaacuacuacggcaagcaggagaacugguacucccugaagaagaacagccggucccugggggagaacgacgacggcaacaacgaggacaacgagaagcuccgcaagcccaagcacaagaagcugaagcagccggcggacgggaaccccgaccccaacgccaaccccaacguggacccgaacgccaaccccaacguggaccccaacgccaaccccaacgucgacccgaacgccaaccccaacgcgaaccccaacgccaaccccaacgccaacccgaacgccaaccccaacgcgaaccccaacgccaaccccaacgccaacccgaacgccaaccccaacgccaaccccaacgcgaaccccaacgccaacccgaacgccaaccccaacgccaaccccaacgccaaccccaacgcgaacccgaacgccaaccccaacguggaccccaacgccaaccccaacgccaacccgaacgccaaccccaacgcgaaccccaacgccaacccgaacgccaaccccaacgccaaccccaacgccaaccccaacgcgaacccgaacgccaaccccaacgccaaccccaacgccaaccccaacgcgaacccgaacgccaaccccaacgccaaccccaacgccaaccccaacgccaacccgaacgcgaacccgcccgugaccaacauggagaacaucaccagcggcuuccugggcccccuccugguccugcaggccggguucuuccuccugacccggauccugacgaucccccagucccucgacagcugguggaccucccugaacuuccugggcgggagccccgugugccucggccagaacucccagagccccaccuccaaccacagccccaccuccugcccgcccaucugccccggguaccgcuggaugugccugcggcgcuucaucaucuuccuguucauccuccugcugugccucaucuuccugcuggugcuccuggacuaccagggcaugcugcccgucugcccgcucauccccggcagcacgaccaccaacaccgggcccugcaagacgugcaccaccccggcccagggcaacagcauguuccccuccugcugcugcaccaagcccacggacgggaacugcacgugcauccccaucccgagcuccugggccuucgccaaguaccugugggagugggcgagcgugcgguucuccuggcugagccuccuggugcccuucguccagugguucgugggccugucccccaccguguggcucagcgccaucuggaugaugugguacuggggccccucccuguacagcaucgucuccccguucaucccccugcuccccaucuucuucugccuguggguguacaucugaggacuagucccuguucccagagcccacuuuuuuuucuuuuuuugaaauaaaauagccugucuuucagaucuaaaaaaaaaaaaaaaaaaaaaaaaaaaaaaaaaaaaaaaaaaaaaaaaaaaaaaaaaaaaaaaaugcaucccccccccccccccccccccccccccccccaaaggcucuuuucagagccaccagaauu

SEQ ID NO: 8876 - RNA, 1902 nt, Artificial Sequence
  mRNA Design a-1 (A64-N5-C30-hSL-N5) comprising derived and/or modified sequence from Pf(3D7)__XP_001351122.1__HsALB_Pf-CSP(19-272)_L(AAY)_Pf-CSP(346-3 65)_L(AAY)_PADRE_L(PVTN)_HBsAg (opt1)
aggagagucccgcagucggcguccagcggcucugcuuguucgugugugugucguugcaggccuuauucaagcuuaccaugaagugggugaccuucaucagccugcuguuccuguucuccagcgccuacucccuguuccaggaguaccagugcuacggcagcuccagcaacacccgcguccucaacgagcugaacuacgacaacgccgggaccaaccuguacaacgagcucgagaugaacuacuacggcaagcaggagaacugguacucccugaagaagaacagccggucccugggggagaacgacgacggcaacaacgaggacaacgagaagcuccgcaagcccaagcacaagaagcugaagcagccggcggacgggaaccccgaccccaacgccaaccccaacguggacccgaacgccaaccccaacguggaccccaacgccaaccccaacgucgacccgaacgccaaccccaacgcgaaccccaacgccaaccccaacgccaacccgaacgccaaccccaacgcgaaccccaacgccaaccccaacgccaacccgaacgccaaccccaacgccaaccccaacgcgaaccccaacgccaacccgaacgccaaccccaacgccaaccccaacgccaaccccaacgcgaacccgaacgccaaccccaacguggaccccaacgccaaccccaacgccaacccgaacgccaaccccaacgcgaaccccaacgccaacccgaacgccaaccccaacgccaaccccaacgccaaccccaacgcgaacccgaacgccaaccccaacgccaaccccaacgccaaccccaacgcgaacccgaacgccaaccccaacgccaaccccaacgccaaccccaacgccaacccgaacgcgaaccccgccgccuacaucaagcccggcagcgccaacaagcccaaggacgagcuggacuacgccaacgacaucgaggcggccuacgccaaguucguggccgccuggacccucaaggcggccgccccggucaccaacauggagaacaucaccuccggcuuccuggggccccugcucgugcugcaggccggcuucuuccugcucacgcggauccugaccaucccccagagccuggacuccugguggaccagccucaacuuccucgggggcucccccgugugccuggggcagaacagccaguccccgaccagcaaccacucccccacgagcugcccgcccaucugccccggcuaccgcuggaugugccuccggcgcuucaucaucuuccuguucauccugcuccugugccugaucuuccuccugguccugcucgacuaccagggcaugcugcccgugugcccccugaucccggggagcaccaccaccaacacgggccccugcaagaccugcaccacccccgcgcaggggaacuccauguuccccagcugcugcugcacgaagccgaccgacggcaacugcacgugcauccccauccccuccagcugggccuucgccaaguaccucugggagugggccuccgugcgguucagcuggcugucccugcucguccccuucgugcagugguucgugggccugagcccgaccgucuggcuguccgccaucuggaugaugugguacugggggcccagccucuacuccaucgugagccccuucaucccccugcugccgaucuucuucugccucuggguguacaucugaggacuagucccuguucccagagcccacuuuuuuuucuuuuuuugaaauaaaauagccugucuuucagaucuaaaaaaaaaaaaaaaaaaaaaaaaaaaaaaaaaaaaaaaaaaaaaaaaaaaaaaaaaaaaaaaaugcaucccccccccccccccccccccccccccccccaaaggcucuuuucagagccaccagaauu

SEQ ID NO: 8877 - RNA, 2121 nt, Artificial Sequence
  mRNA Design a-1 (A64-N5-C30-hSL-N5) comprising derived and/or modified sequence from Pf(3D7)__XP_001351122.1__HsALB_Pf-CSP(19-384)_L(PVTN)_HBsAg (opt1)
aggagagucccgcagucggcguccagcggcucugcuuguucgugugugugucguugcaggccuuauucaagcuuaccaugaagugggugaccuucaucagccugcuguuccuguucuccagcgccuacucccuguuccaggaguaccagugcuacggcagcuccagcaacacccgcguccucaacgagcugaacuacgacaacgccgggacgaaccuguacaacgagcucgagaugaacuacuacggcaagcaggagaacugguacucccugaagaagaacagccggucccugggggagaacgacgacggcaacaacgaggacaacgagaagcuccgcaagcccaagcacaagaagcugaagcagccggcggacgggaaccccgaccccaacgccaaccccaacguggacccgaacgccaaccccaacguggaccccaacgccaaccccaacgucgacccgaacgccaaccccaacgcgaaccccaacgccaaccccaacgccaacccgaacgccaaccccaacgcgaaccccaacgccaaccccaacgccaacccgaacgccaaccccaacgccaaccccaacgcgaaccccaacgccaacccgaacgccaaccccaacgccaaccccaacgccaaccccaacgcgaacccgaacgccaaccccaacguggaccccaacgccaaccccaacgccaacccgaacgccaaccccaacgcgaaccccaacgccaacccgaacgccaaccccaacgccaaccccaacgccaaccccaacgcgaacccgaacgccaaccccaacgccaaccccaacgccaaccccaacgcgaacccgaacgccaaccccaacgccaaccccaacgccaaccccaacgccaacccgaacgcgaaccccaacaagaacaaccagggcaacggccaggggcacaacaugcccaacgaccccaaccggaacguggacgagaacgccaacgccaacagcgccgucaagaacaacaacaacgaggagccguccgacaagcacaucaaggaguaccugaacaagauccagaacagccucuccaccgaguggagccccugcuccgugaccugcggcaacgggauccaggugcgcaucaagcccggcagcgccaacaagcccaaggacgagcuggacuacgcgaacgacaucgagaagaagaucugcaagauggagaagugcuccagcgucuucaacguggugaacuccagcccggucaccaacauggagaacaucacgagcggguuccugggcccccuccuggugcugcaggccggcuucuuccuccugacccggauccugaccaucccccagucccucgacagcugguggaccucccugaacuuccucgggggcagccccgugugccucgggcagaacucccagagcccgacguccaaccacagccccaccuccugcccgcccaucugccccggcuaccgcuggaugugccugcggcgcuucaucaucuuccuguucauccuccugcugugccucaucuuccugcugguccuccuggacuaccagggcaugcugcccgugugcccccucaucccggggagcaccaccacgaacaccggccccugcaagaccugcaccacgcccgcccaggggaacuccauguuccccagcugcugcugcaccaagccgaccgacggcaacugcacgugcauccccauccccuccagcugggccuucgccaaguaccugugggagugggcguccgugcgguucagcuggcugucccuccugguccccuucgugcagugguucguggggcugagcccgaccgucuggcucuccgccaucuggaugaugugguacuggggccccagccuguacagcaucgugucccccuucaucccccugcucccgaucuucuucugccuguggguguacaucugaggacuagucccuguucccagagcccacuuuuuuuucuuuuuuugaaauaaaauagccugucuuucagaucuaaaaaaaaaaaaaaaaaaaaaaaaaaaaaaaaaaaaaaaaaaaaaaaaaaaaaaaaaaaaaaaaugcaucccccccccccccccccccccccccccccccaaaggcucuuuucagagccaccagaauu

SEQ ID NO: 8878 - RNA, 1938 nt, Artificial Sequence
  mRNA Design a-1 (A64-N5-C30-hSL-N5) comprising derived and/or modified sequence from Pf(3D7)__XP_001351122.1__HsALB_Pf-CSP(19-384)_L(SGG)_Ferritin (opt1)
aggagagucccgcagucggcguccagcggcucugcuuguucgugugugugucguugcaggccuuauucaagcuuaccaugaagugggugaccuucaucagccuccuguuccuguucuccagcgccuacucccuguuccaggaguaccagugcuacggcagcuccagcaacacccggguccucaacgagcugaacuacgacaacgccgggacgaaccuguacaacgagcucgagaugaacuacuacggcaagcaggagaacugguacucccugaagaagaacagccggucccugggggagaacgacgacggcaacaacgaggacaacgagaagcuccgcaagcccaagcacaagaagcugaagcagccggcggacgggaaccccgaccccaacgccaaccccaacguggacccgaacgccaaccccaacguggaccccaacgccaaccccaacgucgacccgaacgccaaccccaacgcgaaccccaacgccaaccccaacgccaacccgaacgccaaccccaacgcgaaccccaacgccaaccccaacgccaacccgaacgccaaccccaacgccaaccccaacgcgaaccccaacgccaacccgaacgccaaccccaacgccaaccccaacgccaaccccaacgcgaacccgaacgccaaccccaacguggaccccaacgccaaccccaacgccaacccgaacgccaaccccaacgcgaaccccaacgccaacccgaacgccaaccccaacgccaaccccaacgccaaccccaacgcgaacccgaacgccaaccccaacgccaaccccaacgccaaccccaacgcgaacccgaacgccaaccccaacgccaaccccaacgccaaccccaacgccaacccgaacgcgaaccccaacaagaacaaccagggcaacggccaggggcacaacaugcccaacgaccccaaccggaacguggacgagaacgccaacgccaacagcgccgucaagaacaacaacaacgaggagccguccgacaagcacaucaaggaguaccugaacaagauccagaacagccucuccaccgaguggagccccugcuccgugaccugcggcaacgggauccaggugcgcaucaagcccggcagcgccaacaagcccaaggacgagcuggacuacgcgaacgacaucgagaagaagaucugcaagauggagaagugcuccagcgucuucaacguggugaacuccagcagcgggggccuguccaaggacaucaucaagcuccugaacgagcaggucaacaaggagaugaacagcuccaaccuguacaugagcauguccagcuggugcuacacccacucccucgacggcgccgggcuguuccuguucgaccacgccgccgaggaguacgagcacgccaagaagcucaucaucuuccugaacgagaacaacgugccggugcagcugacgagcaucuccgcgcccgagcacaaguucgagggccucacccagaucuuccagaaggccuacgagcacgagcagcacaucagcgaguccaucaacaacaucgucgaccacgccaucaagagcaaggaccacgccaccuucaacuuccugcagugguacguggcggagcagcacgaggaggaggugcuguucaaggacauccucgacaagaucgagcugaucgggaacgagaaccacggccuguaccucgccgaccaguacgucaagggcaucgccaagucccgcaagagcugaggacuagucccuguucccagagcccacuuuuuuuucuuuuuuugaaauaaaauagccugucuuucagaucuaaaaaaaaaaaaaaaaaaaaaaaaaaaaaaaaaaaaaaaaaaaaaaaaaaaaaaaaaaaaaaaaugcaucccccccccccccccccccccccccccccccaaaggcucuuuucagagccaccagaauu

SEQ ID NO: 8879 - RNA, 1899 nt, Artificial Sequence
  mRNA Design a-1 (A64-N5-C30-hSL-N5) comprising derived and/or modified sequence from Pf(3D7)__XP_001351122.1__HsALB_Pf-CSP(93-384)_L(PVTN)_HBsAg (opt1)
aggagagucccgcagucggcguccagcggcucugcuuguucgugugugugucguugcaggccuuauucaagcuuaccaugaagugggugaccuucaucagccuccuguuccuguucuccagcgccuacuccaagcugaagcagcccgccgacggcaacccggaccccaacgcgaaccccaacgucgaccccaacgccaacccgaacguggaccccaacgccaaccccaacguggaccccaacgccaacccgaacgccaaccccaacgcgaaccccaacgccaaccccaacgccaacccgaacgccaaccccaacgcgaaccccaacgccaaccccaacgccaacccgaacgccaaccccaacgccaaccccaacgcgaaccccaacgccaacccgaacgccaaccccaacgccaaccccaacgccaaccccaacgcgaacccgaacgucgaccccaacgccaaccccaacgccaaccccaacgccaacccgaacgccaaccccaacgcgaaccccaacgccaacccgaacgccaaccccaacgccaaccccaacgccaaccccaacgcgaacccgaacgccaaccccaacgccaaccccaacgccaaccccaacgcgaacccgaacgccaaccccaacgccaaccccaacgccaaccccaacgccaacccgaacaagaacaaccaggggaacggccaggggcacaacaugcccaacgaccccaaccgcaacguggacgagaacgcgaacgccaacagcgccgugaagaacaacaacaacgaggagcccuccgacaagcacaucaaggaguaccucaacaagauccagaacagccuguccaccgaguggagcccgugcuccgugaccugcggcaacgggauccagguccggaucaagcccggcagcgccaacaagcccaaggacgagcuggacuacgccaacgacaucgagaagaagaucugcaagauggagaagugcuccagcguguucaacgucgugaacuccagccccgugaccaacauggagaacaucaccuccggcuuccucgggccgcugcugguccuccaggcgggcuucuuccugcugacccgcauccucacgaucccccagagccuggacuccugguggaccagccugaacuuccucgggggcucccccgugugccuggggcagaacagccagagccccaccuccaaccacagcccgaccuccugcccgcccaucugccccggcuaccgguggaugugccugcgccgguucaucaucuuccucuucauccugcugcucugccugaucuuccugcucgugcugcuggacuaccagggcaugcuccccgucugcccccugauccccgggagcacgaccaccaacaccggcccgugcaagacgugcaccacccccgcccaggggaacuccauguuccccagcugcugcugcaccaagcccacggacggcaacugcacgugcaucccgauccccuccagcugggccuucgccaaguaccugugggagugggccuccgugcgcuucagcuggcucucccugcuggugcccuucguccagugguucgugggccucagccccaccguguggcuguccgcgaucuggaugaugugguacugggggccgagccuguacuccaucgucagccccuucaucccccuccugcccaucuucuucugccuguggguguacaucugaggacuagucccuguucccagagcccacuuuuuuuucuuuuuuugaaauaaaauagccugucuuucagaucuaaaaaaaaaaaaaaaaaaaaaaaaaaaaaaaaaaaaaaaaaaaaaaaaaaaaaaaaaaaaaaaaugcaucccccccccccccccccccccccccccccccaaaggcucuuuucagagccaccagaauu

SEQ ID NO: 8880 - RNA, 1560 nt, Artificial Sequence; identical to SEQ ID NO: 690
  mRNA Design a-1 (A64-N5-C30-hSL-N5) comprising derived and/or modified sequence from Pf(3D7)__XP_001351122.1__HsALB_Pf-CSP(199-377)_L(PVTN)_HBsAg (opt1)

SEQ ID NO: 8881 - RNA, 1257 nt, Artificial Sequence
  mRNA Design a-1 (A64-N5-C30-hSL-N5) comprising derived and/or modified sequence from Pf(3D7)__XP_001351122.1__HsALB_Pf-CSP(19-272)_L(AAY)_Pf-CSP(346-3 75)_L(AAY)_Pf-CSP(310-327) (opt1)
aggagagucccgcagucggcguccagcggcucugcuuguucgugugugugucguugcaggccuuauucaagcuuaccaugaagugggugaccuucaucagccuccuguuccuguucuccagcgccuacucccuguuccaggaguaccagugcuacggcagcuccagcaacacccgcguccucaacgagcugaacuacgacaacgccgggacgaaccuguacaacgagcucgagaugaacuacuacggcaagcaggagaacugguacucccugaagaagaacagccggucccugggggagaacgacgacggcaacaacgaggacaacgagaagcuccgcaagcccaagcacaagaagcugaagcagccggcggacgggaaccccgaccccaacgccaaccccaacguggacccgaacgccaaccccaacguggaccccaacgccaaccccaacgucgacccgaacgccaaccccaacgcgaaccccaacgccaaccccaacgccaacccgaacgccaaccccaacgcgaaccccaacgccaaccccaacgccaacccgaacgccaaccccaacgccaaccccaacgcgaaccccaacgccaacccgaacgccaaccccaacgccaaccccaacgccaaccccaacgcgaacccgaacgccaaccccaacguggaccccaacgccaaccccaacgccaacccgaacgccaaccccaacgcgaaccccaacgccaacccgaacgccaaccccaacgccaaccccaacgccaaccccaacgcgaacccgaacgccaaccccaacgccaaccccaacgccaaccccaacgcgaacccgaacgccaaccccaacgccaaccccaacgccaaccccaacgccaacccgaacgcgaaccccgccgccuacaucaagcccggcagcgccaacaagcccaaggacgagcuggacuacgccaacgacaucgagaagaagaucugcaagauggagaagugcuccgcggccuacgagccgagcgacaagcacaucaaggaguaccucaacaagauccagaacucccugugaggacuagucccuguucccagagcccacuuuuuuuucuuuuuuugaaauaaaauagccugucuuucagaucuaaaaaaaaaaaaaaaaaaaaaaaaaaaaaaaaaaaaaaaaaaaaaaaaaaaaaaaaaaaaaaaaugcaucccccccccccccccccccccccccccccccaaaggcucuuuucagagccaccagaauu

SEQ ID NO: 8882 - RNA, 1305 nt, Artificial Sequence
  mRNA Design a-1 (A64-N5-C30-hSL-N5) comprising derived and/or modified sequence from Pf(3D7)__XP_001351122.1__HsALB_Pf-CSP(19-272)_L(AAY)_Pf-CSP(346-3 75)_L(AAY)_Pf-CSP(310-327)_L(AAY)_PADRE (opt1)
aggagagucccgcagucggcguccagcggcucugcuuguucgugugugugucguugcaggccuuauucaagcuuaccaugaagugggugaccuucaucagccuccuguuccuguucuccagcgccuacucccuguuccaggaguaccagugcuacggcagcuccagcaacacccgcguccucaacgagcugaacuacgacaacgccgggacgaaccuguacaacgagcucgagaugaacuacuacggcaagcaggagaacugguacucccugaagaagaacagccggucccugggggagaacgacgacggcaacaacgaggacaacgagaagcuccgcaagcccaagcacaagaagcugaagcagccggcggacgggaaccccgaccccaacgccaaccccaacguggacccgaacgccaaccccaacguggaccccaacgccaaccccaacgucgacccgaacgccaaccccaacgcgaaccccaacgccaaccccaacgccaacccgaacgccaaccccaacgcgaaccccaacgccaaccccaacgccaacccgaacgccaaccccaacgccaaccccaacgcgaaccccaacgccaacccgaacgccaaccccaacgccaaccccaacgccaaccccaacgcgaacccgaacgccaaccccaacguggaccccaacgccaaccccaacgccaacccgaacgccaaccccaacgcgaaccccaacgccaacccgaacgccaaccccaacgccaaccccaacgccaaccccaacgcgaacccgaacgccaaccccaacgccaaccccaacgccaaccccaacgcgaacccgaacgccaaccccaacgccaaccccaacgccaaccccaacgccaacccgaacgcgaaccccgccgccuacaucaagcccggcagcgccaacaagcccaaggacgagcuggacuacgccaacgacaucgagaagaagaucugcaagauggagaagugcuccgcggccuacgagccgagcgacaagcacaucaaggaguaccucaacaagauccagaacucccuggccgccuacgccaaguucguggcggccuggacccugaaggccgccgcgugaggacuagucccuguucccagagcccacuuuuuuuucuuuuuuugaaauaaaauagccugucuuucagaucuaaaaaaaaaaaaaaaaaaaaaaaaaaaaaaaaaaaaaaaaaaaaaaaaaaaaaaaaaaaaaaaaugcaucccccccccccccccccccccccccccccccaaaggcucuuuucagagccaccagaauu

SEQ ID NO: 8883 - RNA, 1305 nt, Artificial Sequence
  mRNA Design a-1 (A64-N5-C30-hSL-N5) comprising derived and/or modified sequence from Pf(3D7)__XP_001351122.1__HsALB_Pf-CSP(19-272)_L(AAY)_Pf-CSP(310-3 27)_L(AAY)_Pf-CSP(346-375)_L(AAY)_PADRE (opt1)
aggagagucccgcagucggcguccagcggcucugcuuguucgugugugugucguugcaggccuuauucaagcuuaccaugaagugggugaccuucaucagccuccuguuccuguucuccagcgccuacucccuguuccaggaguaccagugcuacggcagcuccagcaacacccgcguccucaacgagcugaacuacgacaacgccgggacgaaccuguacaacgagcucgagaugaacuacuacggcaagcaggagaacugguacucccugaagaagaacagccggucccugggggagaacgacgacggcaacaacgaggacaacgagaagcuccgcaagcccaagcacaagaagcugaagcagccggcggacgggaaccccgaccccaacgccaaccccaacguggacccgaacgccaaccccaacguggaccccaacgccaaccccaacgucgacccgaacgccaaccccaacgcgaaccccaacgccaaccccaacgccaacccgaacgccaaccccaacgcgaaccccaacgccaaccccaacgccaacccgaacgccaaccccaacgccaaccccaacgcgaaccccaacgccaacccgaacgccaaccccaacgccaaccccaacgccaaccccaacgcgaacccgaacgccaaccccaacguggaccccaacgccaaccccaacgccaacccgaacgccaaccccaacgcgaaccccaacgccaacccgaacgccaaccccaacgccaaccccaacgccaaccccaacgcgaacccgaacgccaaccccaacgccaaccccaacgccaaccccaacgcgaacccgaacgccaaccccaacgccaaccccaacgccaaccccaacgccaacccgaacgcgaaccccgccgccuacgagcccagcgacaagcacaucaaggaguaccugaacaagauccagaacucccucgccgccuacaucaagcccggcagcgcgaacaagccgaaggacgagcuggacuacgccaacgacaucgagaagaagaucugcaagauggagaagugcuccgccgccuacgccaaguucguggcggccuggacccugaaggccgccgcgugaggacuagucccuguucccagagcccacuuuuuuuucuuuuuuugaaauaaaauagccugucuuucagaucuaaaaaaaaaaaaaaaaaaaaaaaaaaaaaaaaaaaaaaaaaaaaaaaaaaaaaaaaaaaaaaaaugcaucccccccccccccccccccccccccccccccaaaggcucuuuucagagccaccagaauu

SEQ ID NO: 8884 - RNA, 1359 nt, Artificial Sequence
  mRNA Design a-1 (A64-N5-C30-hSL-N5) comprising derived and/or modified sequence from Pf(3D7)__XP_001351122.1__HsALB_Pf-CSP(19-272)_L(AAY)_Pf-CSP(310-3 27)_L(AAY)_Pf-CSP(346-375)_L(AAY)_PADRE_L(AAY)_P2 (opt1)
aggagagucccgcagucggcguccagcggcucugcuuguucgugugugugucguugcaggccuuauucaagcuuaccaugaagugggugaccuucaucagccuccuguuccuguucuccagcgccuacucccuguuccaggaguaccagugcuacggcagcuccagcaacacccgcguccucaacgagcugaacuacgacaacgccgggacgaaccuguacaacgagcucgagaugaacuacuacggcaagcaggagaacugguacucccugaagaagaacagccggucccugggggagaacgacgacggcaacaacgaggacaacgagaagcuccgcaagcccaagcacaagaagcugaagcagccggcggacgggaaccccgaccccaacgccaaccccaacguggacccgaacgccaaccccaacguggaccccaacgccaaccccaacgucgacccgaacgccaaccccaacgcgaaccccaacgccaaccccaacgccaacccgaacgccaaccccaacgcgaaccccaacgccaaccccaacgccaacccgaacgccaaccccaacgccaaccccaacgcgaaccccaacgccaacccgaacgccaaccccaacgccaaccccaacgccaaccccaacgcgaacccgaacgccaaccccaacguggaccccaacgccaaccccaacgccaacccgaacgccaaccccaacgcgaaccccaacgccaacccgaacgccaaccccaacgccaaccccaacgccaaccccaacgcgaacccgaacgccaaccccaacgccaaccccaacgccaaccccaacgcgaacccgaacgccaaccccaacgccaaccccaacgccaaccccaacgccaacccgaacgcgaaccccgccgccuacgagcccagcgacaagcacaucaaggaguaccugaacaagauccagaacucccucgccgccuacaucaagcccggcagcgcgaacaagccgaaggacgagcuggacuacgccaacgacaucgagaagaagaucugcaagauggagaagugcuccgccgccuacgccaaguucguggcggccuggacccugaaggccgccgcggccgccuaccaguacaucaaggccaacagcaaguucaucggcaucaccgagcucugaggacuagucccuguucccagagcccacuuuuuuuucuuuuuuugaaauaaaauagccugucuuucagaucuaaaaaaaaaaaaaaaaaaaaaaaaaaaaaaaaaaaaaaaaaaaaaaaaaaaaaaaaaaaaaaaaugcaucccccccccccccccccccccccccccccccaaaggcucuuuucagagccaccagaauu

SEQ ID NO: 8885 - RNA, 1323 nt, Artificial Sequence
  mRNA Design a-1 (A64-N5-C30-hSL-N5) comprising derived and/or modified sequence from Pf(3D7)__XP_001351122.1__HsALB_Pf-CSP(19-272)_L(AAY)_Pf-CSP(310-3 27)_Linker (AAY)_Pf-CSP(346-397) (opt1)
aggagagucccgcagucggcguccagcggcucugcuuguucgugugugugucguugcaggccuuauucaagcuuaccaugaagugggugaccuucaucagccuccuguuccuguucuccagcgccuacucccuguuccaggaguaccagugcuacggcagcuccagcaacacccgcguccucaacgagcugaacuacgacaacgccgggacgaaccuguacaacgagcucgagaugaacuacuacggcaagcaggagaacugguacucccugaagaagaacagccggucccugggggagaacgacgacggcaacaacgaggacaacgagaagcuccgcaagcccaagcacaagaagcugaagcagccggcggacgggaaccccgaccccaacgccaaccccaacguggacccgaacgccaaccccaacguggaccccaacgccaaccccaacgucgacccgaacgccaaccccaacgcgaaccccaacgccaaccccaacgccaacccgaacgccaaccccaacgcgaaccccaacgccaaccccaacgccaacccgaacgccaaccccaacgccaaccccaacgcgaaccccaacgccaacccgaacgccaaccccaacgccaaccccaacgccaaccccaacgcgaacccgaacgccaaccccaacguggaccccaacgccaaccccaacgccaacccgaacgccaaccccaacgcgaaccccaacgccaacccgaacgccaaccccaacgccaaccccaacgccaaccccaacgcgaacccgaacgccaaccccaacgccaaccccaacgccaaccccaacgcgaacccgaacgccaaccccaacgccaaccccaacgccaaccccaacgccaacccgaacgcgaaccccgccgccuacgagcccagcgacaagcacaucaaggaguaccugaacaagauccagaacucccucgccgccuacaucaagcccggcagcgcgaacaagccgaaggacgagcuggacuacgccaacgacaucgagaagaagaucugcaagauggagaagugcuccagcguguucaacgucgugaacuccagcaucggccugaucauggugcucuccuuccuguuccugaacugaggacuagucccuguucccagagcccacuuuuuuuucuuuuuuugaaauaaaauagccugucuuucagaucuaaaaaaaaaaaaaaaaaaaaaaaaaaaaaaaaaaaaaaaaaaaaaaaaaaaaaaaaaaaaaaaaugcaucccccccccccccccccccccccccccccccaaaggcucuuuucagagccaccagaauu

SEQ ID NO: 8886 - RNA, 1923 nt, Artificial Sequence
  mRNA Design a-1 (A64-N5-C30-hSL-N5) comprising derived and/or modified sequence from Pf(3D7)__XP_001351122.1__LumSynt_L(GGS4-GGG)_Pf-CSP(19-397) (opt2)
aggagagucccgcagucggcguccagcggcucugcuuguucgugugugugucguugcaggccuuauucaagcuuaccaugcagaucuacgagggcaagcucaccgccgagggccuccgcuucggcaucgucgccucccgcuucaaccacgcccucgucgaccgccucgucgagggcgccaucgacgccaucguccgccacggcggccgcgaggaggacaucacccucguccgcguccccggcuccugggagauccccgucgccgccggcgagcucgcccgcaaggaggacaucgacgccgucaucgccaucggcguccucauccgcggcgccaccccccacuucgacuacaucgccuccgaggucuccaagggccucgccgaccucucccucgagcuccgcaagcccaucaccuucggcgucaucaccgccgacacccucgagcaggccaucgagcgcgccggcaccaagcacggcaacaagggcugggaggccgcccucuccgccaucgagauggccaaccucuucaagucccuccgcggcggcuccggcggcuccggcggcuccggcggcuccggcggcggccucuuccaggaguaccagugcuacggcuccuccuccaacacccgcguccucaacgagcucaacuacgacaacgccggcaccaaccucuacaacgagcucgagaugaacuacuacggcaagcaggagaacugguacucccucaagaagaacucccgcucccucggcgagaacgacgacggcaacaacgaggacaacgagaagcuccgcaagcccaagcacaagaagcucaagcagcccgccgacggcaaccccgaccccaacgccaaccccaacgucgaccccaacgccaaccccaacgucgaccccaacgccaaccccaacgucgaccccaacgccaaccccaacgccaaccccaacgccaaccccaacgccaaccccaacgccaaccccaacgccaaccccaacgccaaccccaacgccaaccccaacgccaaccccaacgccaaccccaacgccaaccccaacgccaaccccaacgccaaccccaacgccaaccccaacgccaaccccaacgccaaccccaacgccaaccccaacgucgaccccaacgccaaccccaacgccaaccccaacgccaaccccaacgccaaccccaacgccaaccccaacgccaaccccaacgccaaccccaacgccaaccccaacgccaaccccaacgccaaccccaacgccaaccccaacgccaaccccaacgccaaccccaacgccaaccccaacgccaaccccaacgccaaccccaacgccaaccccaacgccaaccccaacaagaacaaccagggcaacggccagggccacaacaugcccaacgaccccaaccgcaacgucgacgagaacgccaacgccaacuccgccgucaagaacaacaacaacgaggagcccuccgacaagcacaucaaggaguaccucaacaagauccagaacucccucuccaccgaguggucccccugcuccgucaccugcggcaacggcauccagguccgcaucaagcccggcuccgccaacaagcccaaggacgagcucgacuacgccaacgacaucgagaagaagaucugcaagauggagaagugcuccuccgucuucaacgucgucaacuccuccaucggccucaucaugguccucuccuuccucuuccucaacugaggacuagucccuguucccagagcccacuuuuuuuucuuuuuuugaaauaaaauagccugucuuucagaucuaaaaaaaaaaaaaaaaaaaaaaaaaaaaaaaaaaaaaaaaaaaaaaaaaaaaaaaaaaaaaaaaugcaucccccccccccccccccccccccccccccccaaaggcucuuuucagagccaccagaauu

SEQ ID NO: 8887 - RNA, 1785 nt, Artificial Sequence
  mRNA Design a-1 (A64-N5-C30-hSL-N5) comprising derived and/or modified sequence from Pf(3D7)__XP_001351122.1__HsALB_Pf-CSP(19-272)_L(PVTN)_HBsAg (opt2)
aggagagucccgcagucggcguccagcggcucugcuuguucgugugugugucguugcaggccuuauucaagcuuaccaugaagugggucaccuucaucucccuccucuuccucuucuccuccgccuacucccucuuccaggaguaccagugcuacggcuccuccuccaacacccgcguccucaacgagcucaacuacgacaacgccggcaccaaccucuacaacgagcucgagaugaacuacuacggcaagcaggagaacugguacucccucaagaagaacucccgcucccucggcgagaacgacgacggcaacaacgaggacaacgagaagcuccgcaagcccaagcacaagaagcucaagcagcccgccgacggcaaccccgaccccaacgccaaccccaacgucgaccccaacgccaaccccaacgucgaccccaacgccaaccccaacgucgaccccaacgccaaccccaacgccaaccccaacgccaaccccaacgccaaccccaacgccaaccccaacgccaaccccaacgccaaccccaacgccaaccccaacgccaaccccaacgccaaccccaacgccaaccccaacgccaaccccaacgccaaccccaacgccaaccccaacgccaaccccaacgccaaccccaacgccaaccccaacgucgaccccaacgccaaccccaacgccaaccccaacgccaaccccaacgccaaccccaacgccaaccccaacgccaaccccaacgccaaccccaacgccaaccccaacgccaaccccaacgccaaccccaacgccaaccccaacgccaaccccaacgccaaccccaacgccaaccccaacgccaaccccaacgccaaccccaacgccaaccccaacgccaacccccccgucaccaacauggagaacaucaccuccggcuuccucggcccccuccucguccuccaggccggcuucuuccuccucacccgcauccucaccaucccccagucccucgacuccugguggaccucccucaacuuccucggcggcucccccgucugccucggccagaacucccagucccccaccuccaaccacucccccaccuccugcccccccaucugccccggcuaccgcuggaugugccuccgccgcuucaucaucuuccucuucauccuccuccucugccucaucuuccuccucguccuccucgacuaccagggcaugcuccccgucugcccccucauccccggcuccaccaccaccaacaccggccccugcaagaccugcaccacccccgcccagggcaacuccauguuccccuccugcugcugcaccaagcccaccgacggcaacugcaccugcauccccauccccuccuccugggccuucgccaaguaccucugggagugggccuccguccgcuucuccuggcucucccuccucguccccuucguccagugguucgucggccucucccccaccgucuggcucuccgccaucuggaugaugugguacuggggccccucccucuacuccaucgucucccccuucaucccccuccuccccaucuucuucugccucugggucuacaucugaggacuagucccuguucccagagcccacuuuuuuuucuuuuuuugaaauaaaauagccugucuuucagaucuaaaaaaaaaaaaaaaaaaaaaaaaaaaaaaaaaaaaaaaaaaaaaaaaaaaaaaaaaaaaaaaaugcaucccccccccccccccccccccccccccccccaaaggcucuuuucagagccaccagaauu

SEQ ID NO: 8888 - RNA, 1902 nt, Artificial Sequence
  mRNA Design a-1 (A64-N5-C30-hSL-N5) comprising derived and/or modified sequence from Pf(3D7)__XP_001351122.1__HsALB_Pf-CSP(19-272)_L(AAY)_Pf-CSP(346-3 65)_L(AAY)_PADRE_L(PVTN)_HBsAg (opt2)
aggagagucccgcagucggcguccagcggcucugcuuguucgugugugugucguugcaggccuuauucaagcuuaccaugaagugggucaccuucaucucccuccucuuccucuucuccuccgccuacucccucuuccaggaguaccagugcuacggcuccuccuccaacacccgcguccucaacgagcucaacuacgacaacgccggcaccaaccucuacaacgagcucgagaugaacuacuacggcaagcaggagaacugguacucccucaagaagaacucccgcucccucggcgagaacgacgacggcaacaacgaggacaacgagaagcuccgcaagcccaagcacaagaagcucaagcagcccgccgacggcaaccccgaccccaacgccaaccccaacgucgaccccaacgccaaccccaacgucgaccccaacgccaaccccaacgucgaccccaacgccaaccccaacgccaaccccaacgccaaccccaacgccaaccccaacgccaaccccaacgccaaccccaacgccaaccccaacgccaaccccaacgccaaccccaacgccaaccccaacgccaaccccaacgccaaccccaacgccaaccccaacgccaaccccaacgccaaccccaacgccaaccccaacgccaaccccaacgucgaccccaacgccaaccccaacgccaaccccaacgccaaccccaacgccaaccccaacgccaaccccaacgccaaccccaacgccaaccccaacgccaaccccaacgccaaccccaacgccaaccccaacgccaaccccaacgccaaccccaacgccaaccccaacgccaaccccaacgccaaccccaacgccaaccccaacgccaaccccaacgccaaccccgccgccuacaucaagcccggcuccgccaacaagcccaaggacgagcucgacuacgccaacgacaucgaggccgccuacgccaaguucgucgccgccuggacccucaaggccgccgcccccgucaccaacauggagaacaucaccuccggcuuccucggcccccuccucguccuccaggccggcuucuuccuccucacccgcauccucaccaucccccagucccucgacuccugguggaccucccucaacuuccucggcggcucccccgucugccucggccagaacucccagucccccaccuccaaccacucccccaccuccugcccccccaucugccccggcuaccgcuggaugugccuccgccgcuucaucaucuuccucuucauccuccuccucugccucaucuuccuccucguccuccucgacuaccagggcaugcuccccgucugcccccucauccccggcuccaccaccaccaacaccggccccugcaagaccugcaccacccccgcccagggcaacuccauguuccccuccugcugcugcaccaagcccaccgacggcaacugcaccugcauccccauccccuccuccugggccuucgccaaguaccucugggagugggccuccguccgcuucuccuggcucucccuccucguccccuucguccagugguucgucggccucucccccaccgucuggcucuccgccaucuggaugaugugguacuggggccccucccucuacuccaucgucucccccuucaucccccuccuccccaucuucuucugccucugggucuacaucugaggacuagucccuguucccagagcccacuuuuuuuucuuuuuuugaaauaaaauagccugucuuucagaucuaaaaaaaaaaaaaaaaaaaaaaaaaaaaaaaaaaaaaaaaaaaaaaaaaaaaaaaaaaaaaaaaugcaucccccccccccccccccccccccccccccccaaaggcucuuuucagagccaccagaauu

SEQ ID NO: 8889 - RNA, 2121 nt, Artificial Sequence
  mRNA Design a-1 (A64-N5-C30-hSL-N5) comprising derived and/or modified sequence from Pf(3D7)__XP_001351122.1__HsALB_Pf-CSP(19-384)_L(PVTN)_HBsAg (opt2)
aggagagucccgcagucggcguccagcggcucugcuuguucgugugugugucguugcaggccuuauucaagcuuaccaugaagugggucaccuucaucucccuccucuuccucuucuccuccgccuacucccucuuccaggaguaccagugcuacggcuccuccuccaacacccgcguccucaacgagcucaacuacgacaacgccggcaccaaccucuacaacgagcucgagaugaacuacuacggcaagcaggagaacugguacucccucaagaagaacucccgcucccucggcgagaacgacgacggcaacaacgaggacaacgagaagcuccgcaagcccaagcacaagaagcucaagcagcccgccgacggcaaccccgaccccaacgccaaccccaacgucgaccccaacgccaaccccaacgucgaccccaacgccaaccccaacgucgaccccaacgccaaccccaacgccaaccccaacgccaaccccaacgccaaccccaacgccaaccccaacgccaaccccaacgccaaccccaacgccaaccccaacgccaaccccaacgccaaccccaacgccaaccccaacgccaaccccaacgccaaccccaacgccaaccccaacgccaaccccaacgccaaccccaacgccaaccccaacgucgaccccaacgccaaccccaacgccaaccccaacgccaaccccaacgccaaccccaacgccaaccccaacgccaaccccaacgccaaccccaacgccaaccccaacgccaaccccaacgccaaccccaacgccaaccccaacgccaaccccaacgccaaccccaacgccaaccccaacgccaaccccaacgccaaccccaacgccaaccccaacgccaaccccaacaagaacaaccagggcaacggccagggccacaacaugcccaacgaccccaaccgcaacgucgacgagaacgccaacgccaacuccgccgucaagaacaacaacaacgaggagcccuccgacaagcacaucaaggaguaccucaacaagauccagaacucccucuccaccgaguggucccccugcuccgucaccugcggcaacggcauccagguccgcaucaagcccggcuccgccaacaagcccaaggacgagcucgacuacgccaacgacaucgagaagaagaucugcaagauggagaagugcuccuccgucuucaacgucgucaacuccucccccgucaccaacauggagaacaucaccuccggcuuccucggcccccuccucguccuccaggccggcuucuuccuccucacccgcauccucaccaucccccagucccucgacuccugguggaccucccucaacuuccucggcggcucccccgucugccucggccagaacucccagucccccaccuccaaccacucccccaccuccugcccccccaucugccccggcuaccgcuggaugugccuccgccgcuucaucaucuuccucuucauccuccuccucugccucaucuuccuccucguccuccucgacuaccagggcaugcuccccgucugcccccucauccccggcuccaccaccaccaacaccggccccugcaagaccugcaccacccccgcccagggcaacuccauguuccccuccugcugcugcaccaagcccaccgacggcaacugcaccugcauccccauccccuccuccugggccuucgccaaguaccucugggagugggccuccguccgcuucuccuggcucucccuccucguccccuucguccagugguucgucggccucucccccaccgucuggcucuccgccaucuggaugaugugguacuggggccccucccucuacuccaucgucucccccuucaucccccuccuccccaucuucuucugccucugggucuacaucugaggacuagucccuguucccagagcccacuuuuuuuucuuuuuuugaaauaaaauagccugucuuucagaucuaaaaaaaaaaaaaaaaaaaaaaaaaaaaaaaaaaaaaaaaaaaaaaaaaaaaaaaaaaaaaaaaugcaucccccccccccccccccccccccccccccccaaaggcucuuuucagagccaccagaauu

SEQ ID NO: 8890 - RNA, 1938 nt, Artificial Sequence
  mRNA Design a-1 (A64-N5-C30-hSL-N5) comprising derived and/or modified sequence from Pf(3D7)__XP_001351122.1__HsALB_Pf-CSP(19-384)_L(SGG)_Ferritin (opt2)
aggagagucccgcagucggcguccagcggcucugcuuguucgugugugugucguugcaggccuuauucaagcuuaccaugaagugggucaccuucaucucccuccucuuccucuucuccuccgccuacucccucuuccaggaguaccagugcuacggcuccuccuccaacacccgcguccucaacgagcucaacuacgacaacgccggcaccaaccucuacaacgagcucgagaugaacuacuacggcaagcaggagaacugguacucccucaagaagaacucccgcucccucggcgagaacgacgacggcaacaacgaggacaacgagaagcuccgcaagcccaagcacaagaagcucaagcagcccgccgacggcaaccccgaccccaacgccaaccccaacgucgaccccaacgccaaccccaacgucgaccccaacgccaaccccaacgucgaccccaacgccaaccccaacgccaaccccaacgccaaccccaacgccaaccccaacgccaaccccaacgccaaccccaacgccaaccccaacgccaaccccaacgccaaccccaacgccaaccccaacgccaaccccaacgccaaccccaacgccaaccccaacgccaaccccaacgccaaccccaacgccaaccccaacgccaaccccaacgucgaccccaacgccaaccccaacgccaaccccaacgccaaccccaacgccaaccccaacgccaaccccaacgccaaccccaacgccaaccccaacgccaaccccaacgccaaccccaacgccaaccccaacgccaaccccaacgccaaccccaacgccaaccccaacgccaaccccaacgccaaccccaacgccaaccccaacgccaaccccaacgccaaccccaacaagaacaaccagggcaacggccagggccacaacaugcccaacgaccccaaccgcaacgucgacgagaacgccaacgccaacuccgccgucaagaacaacaacaacgaggagcccuccgacaagcacaucaaggaguaccucaacaagauccagaacucccucuccaccgaguggucccccugcuccgucaccugcggcaacggcauccagguccgcaucaagcccggcuccgccaacaagcccaaggacgagcucgacuacgccaacgacaucgagaagaagaucugcaagauggagaagugcuccuccgucuucaacgucgucaacuccuccuccggcggccucuccaaggacaucaucaagcuccucaacgagcaggucaacaaggagaugaacuccuccaaccucuacauguccauguccuccuggugcuacacccacucccucgacggcgccggccucuuccucuucgaccacgccgccgaggaguacgagcacgccaagaagcucaucaucuuccucaacgagaacaacguccccguccagcucaccuccaucuccgcccccgagcacaaguucgagggccucacccagaucuuccagaaggccuacgagcacgagcagcacaucuccgaguccaucaacaacaucgucgaccacgccaucaaguccaaggaccacgccaccuucaacuuccuccagugguacgucgccgagcagcacgaggaggagguccucuucaaggacauccucgacaagaucgagcucaucggcaacgagaaccacggccucuaccucgccgaccaguacgucaagggcaucgccaagucccgcaaguccugaggacuagucccuguucccagagcccacuuuuuuuucuuuuuuugaaauaaaauagccugucuuucagaucuaaaaaaaaaaaaaaaaaaaaaaaaaaaaaaaaaaaaaaaaaaaaaaaaaaaaaaaaaaaaaaaaugcaucccccccccccccccccccccccccccccccaaaggcucuuuucagagccaccagaauu

SEQ ID NO: 8891 - RNA, 1899 nt, Artificial Sequence
  mRNA Design a-1 (A64-N5-C30-hSL-N5) comprising derived and/or modified sequence from Pf(3D7)__XP_001351122.1__HsALB_Pf-CSP(93-384)_L(PVTN)_HBsAg (opt2)
aggagagucccgcagucggcguccagcggcucugcuuguucgugugugugucguugcaggccuuauucaagcuuaccaugaagugggucaccuucaucucccuccucuuccucuucuccuccgccuacuccaagcucaagcagcccgccgacggcaaccccgaccccaacgccaaccccaacgucgaccccaacgccaaccccaacgucgaccccaacgccaaccccaacgucgaccccaacgccaaccccaacgccaaccccaacgccaaccccaacgccaaccccaacgccaaccccaacgccaaccccaacgccaaccccaacgccaaccccaacgccaaccccaacgccaaccccaacgccaaccccaacgccaaccccaacgccaaccccaacgccaaccccaacgccaaccccaacgccaaccccaacgccaaccccaacgucgaccccaacgccaaccccaacgccaaccccaacgccaaccccaacgccaaccccaacgccaaccccaacgccaaccccaacgccaaccccaacgccaaccccaacgccaaccccaacgccaaccccaacgccaaccccaacgccaaccccaacgccaaccccaacgccaaccccaacgccaaccccaacgccaaccccaacgccaaccccaacgccaaccccaacaagaacaaccagggcaacggccagggccacaacaugcccaacgaccccaaccgcaacgucgacgagaacgccaacgccaacuccgccgucaagaacaacaacaacgaggagcccuccgacaagcacaucaaggaguaccucaacaagauccagaacucccucuccaccgaguggucccccugcuccgucaccugcggcaacggcauccagguccgcaucaagcccggcuccgccaacaagcccaaggacgagcucgacuacgccaacgacaucgagaagaagaucugcaagauggagaagugcuccuccgucuucaacgucgucaacuccucccccgucaccaacauggagaacaucaccuccggcuuccucggcccccuccucguccuccaggccggcuucuuccuccucacccgcauccucaccaucccccagucccucgacuccugguggaccucccucaacuuccucggcggcucccccgucugccucggccagaacucccagucccccaccuccaaccacucccccaccuccugcccccccaucugccccggcuaccgcuggaugugccuccgccgcuucaucaucuuccucuucauccuccuccucugccucaucuuccuccucguccuccucgacuaccagggcaugcuccccgucugcccccucauccccggcuccaccaccaccaacaccggccccugcaagaccugcaccacccccgcccagggcaacuccauguuccccuccugcugcugcaccaagcccaccgacggcaacugcaccugcauccccauccccuccuccugggccuucgccaaguaccucugggagugggccuccguccgcuucuccuggcucucccuccucguccccuucguccagugguucgucggccucucccccaccgucuggcucuccgccaucuggaugaugugguacuggggccccucccucuacuccaucgucucccccuucaucccccuccuccccaucuucuucugccucugggucuacaucugaggacuagucccuguucccagagcccacuuuuuuuucuuuuuuugaaauaaaauagccugucuuucagaucuaaaaaaaaaaaaaaaaaaaaaaaaaaaaaaaaaaaaaaaaaaaaaaaaaaaaaaaaaaaaaaaaugcaucccccccccccccccccccccccccccccccaaaggcucuuuucagagccaccagaauu

SEQ ID NO: 8892 - RNA, 1560 nt, Artificial Sequence; identical to SEQ ID NO: 726
  mRNA Design a-1 (A64-N5-C30-hSL-N5) comprising derived and/or modified sequence from Pf(3D7)__XP_001351122.1__HsALB_Pf-CSP(199-377)_L(PVTN)_HBsAg (opt2)

SEQ ID NO: 8893 - RNA, 1257 nt, Artificial Sequence
  mRNA Design a-1 (A64-N5-C30-hSL-N5) comprising derived and/or modified sequence from Pf(3D7)__XP_001351122.1__HsALB_Pf-CSP(19-272)_L(AAY)_Pf-CSP(346-3 75)_L(AAY)_Pf-CSP(310-327) (opt2)
aggagagucccgcagucggcguccagcggcucugcuuguucgugugugugucguugcaggccuuauucaagcuuaccaugaagugggucaccuucaucucccuccucuuccucuucuccuccgccuacucccucuuccaggaguaccagugcuacggcuccuccuccaacacccgcguccucaacgagcucaacuacgacaacgccggcaccaaccucuacaacgagcucgagaugaacuacuacggcaagcaggagaacugguacucccucaagaagaacucccgcucccucggcgagaacgacgacggcaacaacgaggacaacgagaagcuccgcaagcccaagcacaagaagcucaagcagcccgccgacggcaaccccgaccccaacgccaaccccaacgucgaccccaacgccaaccccaacgucgaccccaacgccaaccccaacgucgaccccaacgccaaccccaacgccaaccccaacgccaaccccaacgccaaccccaacgccaaccccaacgccaaccccaacgccaaccccaacgccaaccccaacgccaaccccaacgccaaccccaacgccaaccccaacgccaaccccaacgccaaccccaacgccaaccccaacgccaaccccaacgccaaccccaacgccaaccccaacgucgaccccaacgccaaccccaacgccaaccccaacgccaaccccaacgccaaccccaacgccaaccccaacgccaaccccaacgccaaccccaacgccaaccccaacgccaaccccaacgccaaccccaacgccaaccccaacgccaaccccaacgccaaccccaacgccaaccccaacgccaaccccaacgccaaccccaacgccaaccccaacgccaaccccgccgccuacaucaagcccggcuccgccaacaagcccaaggacgagcucgacuacgccaacgacaucgagaagaagaucugcaagauggagaagugcuccgccgccuacgagcccuccgacaagcacaucaaggaguaccucaacaagauccagaacucccucugaggacuagucccuguucccagagcccacuuuuuuuucuuuuuuugaaauaaaauagccugucuuucagaucuaaaaaaaaaaaaaaaaaaaaaaaaaaaaaaaaaaaaaaaaaaaaaaaaaaaaaaaaaaaaaaaaugcaucccccccccccccccccccccccccccccccaaaggcucuuuucagagccaccagaauu

SEQ ID NO: 8894 - RNA, 1305 nt, Artificial Sequence
  mRNA Design a-1 (A64-N5-C30-hSL-N5) comprising derived and/or modified sequence from Pf(3D7)__XP_001351122.1__HsALB_Pf-CSP(19-272)_L(AAY)_Pf-CSP(346-3 75)_L(AAY)_Pf-CSP(310-327)_L(AAY)_PADRE (opt2)
aggagagucccgcagucggcguccagcggcucugcuuguucgugugugugucguugcaggccuuauucaagcuuaccaugaagugggucaccuucaucucccuccucuuccucuucuccuccgccuacucccucuuccaggaguaccagugcuacggcuccuccuccaacacccgcguccucaacgagcucaacuacgacaacgccggcaccaaccucuacaacgagcucgagaugaacuacuacggcaagcaggagaacugguacucccucaagaagaacucccgcucccucggcgagaacgacgacggcaacaacgaggacaacgagaagcuccgcaagcccaagcacaagaagcucaagcagcccgccgacggcaaccccgaccccaacgccaaccccaacgucgaccccaacgccaaccccaacgucgaccccaacgccaaccccaacgucgaccccaacgccaaccccaacgccaaccccaacgccaaccccaacgccaaccccaacgccaaccccaacgccaaccccaacgccaaccccaacgccaaccccaacgccaaccccaacgccaaccccaacgccaaccccaacgccaaccccaacgccaaccccaacgccaaccccaacgccaaccccaacgccaaccccaacgccaaccccaacgucgaccccaacgccaaccccaacgccaaccccaacgccaaccccaacgccaaccccaacgccaaccccaacgccaaccccaacgccaaccccaacgccaaccccaacgccaaccccaacgccaaccccaacgccaaccccaacgccaaccccaacgccaaccccaacgccaaccccaacgccaaccccaacgccaaccccaacgccaaccccaacgccaaccccgccgccuacaucaagcccggcuccgccaacaagcccaaggacgagcucgacuacgccaacgacaucgagaagaagaucugcaagauggagaagugcuccgccgccuacgagcccuccgacaagcacaucaaggaguaccucaacaagauccagaacucccucgccgccuacgccaaguucgucgccgccuggacccucaaggccgccgccugaggacuagucccuguucccagagcccacuuuuuuuucuuuuuuugaaauaaaauagccugucuuucagaucuaaaaaaaaaaaaaaaaaaaaaaaaaaaaaaaaaaaaaaaaaaaaaaaaaaaaaaaaaaaaaaaaugcaucccccccccccccccccccccccccccccccaaaggcucuuuucagagccaccagaauu

SEQ ID NO: 8895 - RNA, 1305 nt, Artificial Sequence
  mRNA Design a-1 (A64-N5-C30-hSL-N5) comprising derived and/or modified sequence from Pf(3D7)__XP_001351122.1__HsALB_Pf-CSP(19-272)_L(AAY)_Pf-CSP(310-3 27)_L(AAY)_Pf-CSP(346-375)_L(AAY)_PADRE (opt2)
aggagagucccgcagucggcguccagcggcucugcuuguucgugugugugucguugcaggccuuauucaagcuuaccaugaagugggucaccuucaucucccuccucuuccucuucuccuccgccuacucccucuuccaggaguaccagugcuacggcuccuccuccaacacccgcguccucaacgagcucaacuacgacaacgccggcaccaaccucuacaacgagcucgagaugaacuacuacggcaagcaggagaacugguacucccucaagaagaacucccgcucccucggcgagaacgacgacggcaacaacgaggacaacgagaagcuccgcaagcccaagcacaagaagcucaagcagcccgccgacggcaaccccgaccccaacgccaaccccaacgucgaccccaacgccaaccccaacgucgaccccaacgccaaccccaacgucgaccccaacgccaaccccaacgccaaccccaacgccaaccccaacgccaaccccaacgccaaccccaacgccaaccccaacgccaaccccaacgccaaccccaacgccaaccccaacgccaaccccaacgccaaccccaacgccaaccccaacgccaaccccaacgccaaccccaacgccaaccccaacgccaaccccaacgccaaccccaacgucgaccccaacgccaaccccaacgccaaccccaacgccaaccccaacgccaaccccaacgccaaccccaacgccaaccccaacgccaaccccaacgccaaccccaacgccaaccccaacgccaaccccaacgccaaccccaacgccaaccccaacgccaaccccaacgccaaccccaacgccaaccccaacgccaaccccaacgccaaccccaacgccaaccccgccgccuacgagcccuccgacaagcacaucaaggaguaccucaacaagauccagaacucccucgccgccuacaucaagcccggcuccgccaacaagcccaaggacgagcucgacuacgccaacgacaucgagaagaagaucugcaagauggagaagugcuccgccgccuacgccaaguucgucgccgccuggacccucaaggccgccgccugaggacuagucccuguucccagagcccacuuuuuuuucuuuuuuugaaauaaaauagccugucuuucagaucuaaaaaaaaaaaaaaaaaaaaaaaaaaaaaaaaaaaaaaaaaaaaaaaaaaaaaaaaaaaaaaaaugcaucccccccccccccccccccccccccccccccaaaggcucuuuucagagccaccagaauu

SEQ ID NO: 8896 - RNA, 1359 nt, Artificial Sequence
  mRNA Design a-1 (A64-N5-C30-hSL-N5) comprising derived and/or modified sequence from Pf(3D7)__XP_001351122.1__HsALB_Pf-CSP(19-272)_L(AAY)_Pf-CSP(310-3 27)_L(AAY)_Pf-CSP(346-375)_L(AAY)_PADRE_L(AAY)_P2 (opt2)
aggagagucccgcagucggcguccagcggcucugcuuguucgugugugugucguugcaggccuuauucaagcuuaccaugaagugggucaccuucaucucccuccucuuccucuucuccuccgccuacucccucuuccaggaguaccagugcuacggcuccuccuccaacacccgcguccucaacgagcucaacuacgacaacgccggcaccaaccucuacaacgagcucgagaugaacuacuacggcaagcaggagaacugguacucccucaagaagaacucccgcucccucggcgagaacgacgacggcaacaacgaggacaacgagaagcuccgcaagcccaagcacaagaagcucaagcagcccgccgacggcaaccccgaccccaacgccaaccccaacgucgaccccaacgccaaccccaacgucgaccccaacgccaaccccaacgucgaccccaacgccaaccccaacgccaaccccaacgccaaccccaacgccaaccccaacgccaaccccaacgccaaccccaacgccaaccccaacgccaaccccaacgccaaccccaacgccaaccccaacgccaaccccaacgccaaccccaacgccaaccccaacgccaaccccaacgccaaccccaacgccaaccccaacgccaaccccaacgucgaccccaacgccaaccccaacgccaaccccaacgccaaccccaacgccaaccccaacgccaaccccaacgccaaccccaacgccaaccccaacgccaaccccaacgccaaccccaacgccaaccccaacgccaaccccaacgccaaccccaacgccaaccccaacgccaaccccaacgccaaccccaacgccaaccccaacgccaaccccaacgccaaccccgccgccuacgagcccuccgacaagcacaucaaggaguaccucaacaagauccagaacucccucgccgccuacaucaagcccggcuccgccaacaagcccaaggacgagcucgacuacgccaacgacaucgagaagaagaucugcaagauggagaagugcuccgccgccuacgccaaguucgucgccgccuggacccucaaggccgccgccgccgccuaccaguacaucaaggccaacuccaaguucaucggcaucaccgagcucugaggacuagucccuguucccagagcccacuuuuuuuucuuuuuuugaaauaaaauagccugucuuucagaucuaaaaaaaaaaaaaaaaaaaaaaaaaaaaaaaaaaaaaaaaaaaaaaaaaaaaaaaaaaaaaaaaugcaucccccccccccccccccccccccccccccccaaaggcucuuuucagagccaccagaauu

SEQ ID NO: 8897 - RNA, 1323 nt, Artificial Sequence
  mRNA Design a-1 (A64-N5-C30-hSL-N5) comprising derived and/or modified sequence from Pf(3D7)__XP_001351122.1__HsALB_Pf-CSP(19-272)_L(AAY)_Pf-CSP(310-3 27)_Linker (AAY)_Pf-CSP(346-397) (opt2)
aggagagucccgcagucggcguccagcggcucugcuuguucgugugugugucguugcaggccuuauucaagcuuaccaugaagugggucaccuucaucucccuccucuuccucuucuccuccgccuacucccucuuccaggaguaccagugcuacggcuccuccuccaacacccgcguccucaacgagcucaacuacgacaacgccggcaccaaccucuacaacgagcucgagaugaacuacuacggcaagcaggagaacugguacucccucaagaagaacucccgcucccucggcgagaacgacgacggcaacaacgaggacaacgagaagcuccgcaagcccaagcacaagaagcucaagcagcccgccgacggcaaccccgaccccaacgccaaccccaacgucgaccccaacgccaaccccaacgucgaccccaacgccaaccccaacgucgaccccaacgccaaccccaacgccaaccccaacgccaaccccaacgccaaccccaacgccaaccccaacgccaaccccaacgccaaccccaacgccaaccccaacgccaaccccaacgccaaccccaacgccaaccccaacgccaaccccaacgccaaccccaacgccaaccccaacgccaaccccaacgccaaccccaacgccaaccccaacgucgaccccaacgccaaccccaacgccaaccccaacgccaaccccaacgccaaccccaacgccaaccccaacgccaaccccaacgccaaccccaacgccaaccccaacgccaaccccaacgccaaccccaacgccaaccccaacgccaaccccaacgccaaccccaacgccaaccccaacgccaaccccaacgccaaccccaacgccaaccccaacgccaaccccgccgccuacgagcccuccgacaagcacaucaaggaguaccucaacaagauccagaacucccucgccgccuacaucaagcccggcuccgccaacaagcccaaggacgagcucgacuacgccaacgacaucgagaagaagaucugcaagauggagaagugcuccuccgucuucaacgucgucaacuccuccaucggccucaucaugguccucuccuuccucuuccucaacugaggacuagucccuguucccagagcccacuuuuuuuucuuuuuuugaaauaaaauagccugucuuucagaucuaaaaaaaaaaaaaaaaaaaaaaaaaaaaaaaaaaaaaaaaaaaaaaaaaaaaaaaaaaaaaaaaugcaucccccccccccccccccccccccccccccccaaaggcucuuuucagagccaccagaauu

SEQ ID NO: 8898 - RNA, 1923 nt, Artificial Sequence
  mRNA Design a-1 (A64-N5-C30-hSL-N5) comprising derived and/or modified sequence from Pf(3D7)__XP_001351122.1__LumSynt_L(GGS4-GGG)_Pf-CSP(19-397) (opt3)
aggagagucccgcagucggcguccagcggcucugcuuguucgugugugugucguugcaggccuuauucaagcuuaccaugcagaucuacgagggcaagcugaccgccgaagggcucagauucggaauuguggcuagcagguuuaaccacgcacuugucgaccggcugguugagggugccauagaugcgaucgugcgccauggcgggcgagaagaggacauuacauugguacgugugcccggauccugggaaaucccugucgcugccggcgaguuagcaagaaaagaggauauugacgccgugaucgcuauagguguucugaucaggggagcaacuccacacuucgauuauauugccucugaagugucaaaggggcuagcugaccucagucuggagcuucggaaaccgaucacguuuggcgucauuaccgccgauacacuggaacaagcgaucgagcgcgcaggcacuaagcaugggaauaaaggaugggaggccgcuuugagcgccauagaaauggcaaaccucuucaagucccugagagguggcucugggggaucgggcgguucagggggaagcggcggcgggcuguuucaggaguaccagugcuauggaaguuccucuaauaccagggugcucaacgaauuaaauuacgacaacgcugguacaaaucuguauaacgagcuugaaaugaauuacuauggcaagcaggagaacugguacagcuugaaaaagaacucccggucacugggggagaaugaugacggaaauaacgaagauaaugagaaacuacgcaagcccaaacacaagaagcucaaacaaccugccgacggcaacccagaucccaacgcgaauccuaacguagacccaaaugccaaccccaauguugacccuaacgcaaauccaaacguggauccgaaugcuaaccccaaugccaacccuaaugcuaacccaaaugccaaccccaacgcaaauccuaacgccaauccaaacgcuaaucccaacgcgaauccgaacgcaaauccuaacgccaaucccaacgcuaauccaaacgccaauccuaacgcaaaccccaaugccaacccaaaugcuaaccccaaugccaacccuaaugcaaacccaaaugucgacccgaacgcgaaucccaacgcuaauccuaacgccaauccaaacgcaaaccccaaugccaacccuaaugcuaacccaaaugccaaccccaaugcaaacccgaaugcuaacccuaaugccaacccaaaugcgaaccccaaugccaacccuaaugcuaaccccaacgcaaauccaaacgccaauccuaacgcuaaucccaacgccaauccaaacgcaaauccgaacaagaauaaccaggguaaugggcagggccauaacaugccuaaugaucccaaccgaaacguggacgaaaaugcgaacgccaauagugcugugaaaaacaauaacaaugaggaaccaagcgauaagcacauuaaagaguaccugaacaagauccaaaauucucuuuccaccgaguggucacccugcagcgucacuugcggaaacggcauucagguuagaaucaaaccugggagugccaauaagccaaaggacgaacuggauuaugcaaacgacaucgagaaaaagauuuguaaaauggaaaaguguucuuccguguucaauguagugaacagcucgauaggauugaucaugguccucucuuuucuguucuuaaauugaggacuagucccuguucccagagcccacuuuuuuuucuuuuuuugaaauaaaauagccugucuuucagaucuaaaaaaaaaaaaaaaaaaaaaaaaaaaaaaaaaaaaaaaaaaaaaaaaaaaaaaaaaaaaaaaaugcaucccccccccccccccccccccccccccccccaaaggcucuuuucagagccaccagaauu

SEQ ID NO: 8899 - RNA, 1785 nt, Artificial Sequence
  mRNA Design a-1 (A64-N5-C30-hSL-N5) comprising derived and/or modified sequence from Pf(3D7)__XP_001351122.1__HsALB_Pf-CSP(19-272)_L(PVTN)_HBsAg (opt3)
aggagagucccgcagucggcguccagcggcucugcuuguucgugugugugucguugcaggccuuauucaagcuuaccaugaagugggugaccuucaucagccugcucuuucuuuucuccucugccuacucacuguuucaggaguaucaaugcuacggcaguagcuccaacacaagagucuugaaugaauuaaacuaugacaaugcugggacuaaccuguacaaugagcuagaaaugaacuauuacggaaaacaggagaauugguauucucucaagaaaaacucgaggucacugggugaaaaugaugacggcaacaaugaggauaacgagaaacuucggaagcccaagcacaagaaacugaagcagccugcagacgggaauccagauccgaacgccaaucccaacguugacccuaacgcgaauccaaacguggaucccaaugcuaacccuaauguagacccaaacgccaaucccaacgcaaauccuaacgccaauccaaacgcuaauccgaacgcaaaucccaacgccaacccuaaugcuaacccaaaugccaaccccaaugcgaacccuaaugcaaacccaaaugccaaccccaaugcuaacccgaaugccaacccuaaugcaaaccccaacgcuaauccaaacgccaauccuaacgcgaaucccaacguggauccaaaugccaaccccaaugcaaacccuaaugcuaacccaaaugccaacccgaaugcuaaccccaacgccaauccuaacgcaaauccaaacgccaaucccaacgcuaauccuaacgcgaauccaaacgcaaaucccaacgccaauccgaacgcuaauccuaacgccaauccaaacgcaaaccccaaugccaacccuaaugcuaaccccaaugccaacccaccugucacgaauauggaaaacauuaccagcggauucuugggcccccuccuggugcugcaggcaggguuuuuccucuuaacacgcauacugacuaucccacaaagucuugacuccugguggaccucuuugaauuuucuggguggaagcccgguuugucuaggccagaacucccagucaccuacaaguaaucauagccccaccucuugcccacccauuuguccuggcuaccgauggaugugccuccguagauucaucauuuuucuguucauccuucuguugugucucauauuucuguuagugcugcucgauuaccaggggaugcuuccagucugcccccugaucccuggauccacuacaaccaacacggguccguguaaaacuugcaccacaccagcgcaaggcaauucaauguuccccagcuguugcuguacuaagccuaccgacgggaacugcacaugcauuccaauccccaguucuugggcuuuugccaaauauuugugggagugggcauccgugagguucagcuggcuaucgcugcucguaccuuucguucagugguuugugggacugucuccgaccgucuggcuuuccgccauuuggaugaugugguacuggggccccucacuguauaguaucgugagcccauucauaccuuugcuccccaucuuuuucugucuguggguguacauuugaggacuagucccuguucccagagcccacuuuuuuuucuuuuuuugaaauaaaauagccugucuuucagaucuaaaaaaaaaaaaaaaaaaaaaaaaaaaaaaaaaaaaaaaaaaaaaaaaaaaaaaaaaaaaaaaaugcaucccccccccccccccccccccccccccccccaaaggcucuuuucagagccaccagaauu

SEQ ID NO: 8900 - RNA, 1902 nt, Artificial Sequence
  mRNA Design a-1 (A64-N5-C30-hSL-N5) comprising derived and/or modified sequence from Pf(3D7)__XP_001351122.1__HsALB_Pf-CSP(19-272)_L(AAY)_Pf-CSP(346-3 65)_L(AAY)_PADRE_L(PVTN)_HBsAg (opt3)
aggagagucccgcagucggcguccagcggcucugcuuguucgugugugugucguugcaggccuuauucaagcuuaccaugaagugggugaccuucaucagccugcucuuucuuuucuccucugccuacucacuguuucaggaguaucaaugcuacggcaguagcuccaacacaagagucuugaaugaauuaaacuaugacaaugcugggacuaaccuguacaaugagcuagaaaugaacuauuacggaaaacaggagaauugguauucucucaagaaaaacucgaggucacugggugaaaaugaugacggcaacaaugaggauaacgagaaacuucggaagcccaagcacaagaaacugaagcagccugcagacgggaauccagauccgaacgccaaucccaacguugacccuaacgcgaauccaaacguggaucccaaugcuaacccuaauguagacccaaacgccaaucccaacgcaaauccuaacgccaauccaaacgcuaauccgaacgcaaaucccaacgccaacccuaaugcuaacccaaaugccaaccccaaugcgaacccuaaugcaaacccaaaugccaaccccaaugcuaacccgaaugccaacccuaaugcaaaccccaacgcuaauccaaacgccaauccuaacgcgaaucccaacguggauccaaaugccaaccccaaugcaaacccuaaugcuaacccaaaugccaacccgaaugcuaaccccaacgccaauccuaacgcaaauccaaacgccaaucccaacgcuaauccuaacgcgaauccaaacgcaaaucccaacgccaauccgaacgcuaauccuaacgccaauccaaacgcaaaccccaaugccaacccuaaugcuaaccccaaugccaacccagcagcguacauuaaaccuggaagcgcuaauaagcccaaagacgaauuggauuacgccaacgacauagaggcagccuaugcuaaguucgucgccgcauggacgcucaaggcugccgcgccagugaccaauauggaaaacaucacaaguggcuuucuggguccgcugcucguuuuacaggccggguucuuucugcuuacucgcauuuugaccaucccucaaucccuggauucuugguggacaagccuaaauuuccucggaggcucccccgugugucugggccagaacucacagaguccaaccagcaaucauucucccacuuccugcccuccaauuugucccggguaccgauggaugugccuucguagauuuaucauauuccuguuuaucuugcuccuguguuuaauuuuccugcucguccuucuggacuaucagggaauguugccugugugcccgcuaaucccagguucaacaaccacgaacacuggccccuguaaaaccugcacaacuccugcucaagggaauagcauguuuccaaguuguugcuguaccaagcccacagacggaaacuguaccugcauuccuaucccgucuuccugggcauucgccaaauaccugugggagugggcuagcguaagguucucguggcucucucugcuuguucccuuugugcagugguucgucggccuguccccaacggugugguugucagccauauggaugaugugguauugggguccuagucucuacagcauugugucccccuuuaucccacuguuaccuauuuucuuuugccugugggucuauaucugaggacuagucccuguucccagagcccacuuuuuuuucuuuuuuugaaauaaaauagccugucuuucagaucuaaaaaaaaaaaaaaaaaaaaaaaaaaaaaaaaaaaaaaaaaaaaaaaaaaaaaaaaaaaaaaaaugcaucccccccccccccccccccccccccccccccaaaggcucuuuucagagccaccagaauu

SEQ ID NO: 8901 - RNA, 2121 nt, Artificial Sequence
  mRNA Design a-1 (A64-N5-C30-hSL-N5) comprising derived and/or modified sequence from Pf(3D7)__XP_001351122.1__HsALB_Pf-CSP(19-384)_L(PVTN)_HBsAg (opt3)
aggagagucccgcagucggcguccagcggcucugcuuguucgugugugugucguugcaggccuuauucaagcuuaccaugaagugggugaccuucaucagccugcucuuucuuuucuccucugccuacucacuguuucaggaguaucaaugcuacggcaguagcuccaacacaagagucuugaaugaauuaaacuaugacaaugcugggacuaaccuguacaaugagcuagaaaugaacuauuacggaaaacaggagaauugguauucucucaagaaaaacucgaggucacugggugaaaaugaugacggcaacaaugaggauaacgagaaacuucggaagcccaagcacaagaaacugaagcagccugcagacgggaauccagauccgaacgccaaucccaacguugacccuaacgcgaauccaaacguggaucccaaugcuaacccuaauguagacccaaacgccaaucccaacgcaaauccuaacgccaauccaaacgcuaauccgaacgcaaaucccaacgccaacccuaaugcuaacccaaaugccaaccccaaugcgaacccuaaugcaaacccaaaugccaaccccaaugcuaacccgaaugccaacccuaaugcaaaccccaacgcuaauccaaacgccaauccuaacgcgaaucccaacguggauccaaaugccaaccccaaugcaaacccuaaugcuaacccaaaugccaacccgaaugcuaaccccaacgccaauccuaacgcaaauccaaacgccaaucccaacgcuaauccuaacgcgaauccaaacgcaaaucccaacgccaauccgaacgcuaauccuaacgccaauccaaacgcaaaccccaaugccaacccuaaugcuaaccccaaugccaacccaaauaaaaacaaucagggaaacggccaaggucauaauaugccuaacgaccccaaucgcaacgucgaugaaaaugcaaacgcgaacagcgcugugaagaauaacaauaacgaggaaccaagugacaaacacauuaaggaguacuugaauaagauacagaacucccucucuacggaguggagcccguguuccguuaccugcgggaauggaauccaggugcgaauuaaaccuggcucagccaacaagcccaaagaugaacuggacuacgcaaaugacaucgagaagaaaauuuguaagauggaaaaaugcaguagcgucuucaacgugguaaauucuuccccaguuacaaacauggagaauaucacuucaggcuuucuggggccccucuuagugcugcaggccggauucuuucuuuugacccguauacugacaaucccucaaagccuagauaguugguggaccucucucaacuuccuggguggcuccccagucugucuugggcagaauagccagucgcccacuucuaaccauuccccuacaucaugcccgccaauuugucccggauauagauggaugugccugaggcgguuuaucauuuucuuguuuauccuccuguuaugucugauauuccuccuugugcuguuggacuaccagggcaugcuaccugugugcccacugauucccgguaguaccacgacuaacaccgggccuuguaagacaugcacuaccccggcucaaggaaauagcauguuucccuccugcuguugcacaaagccaaccgauggcaacuguacgugcaucccuauucccucuagcugggccuucgcaaaauaucucugggaaugggcuucaguccgcuucaguuggcugucccuucugguuccauuugugcagugguucguaggcuugagcccuacuguguggcucucugccaucuggaugaugugguacugggggcccucacuguauaguaucgucagcccauuuauuccguuacugccuauauucuuuugucuauggguguacaucugaggacuagucccuguucccagagcccacuuuuuuuucuuuuuuugaaauaaaauagccugucuuucagaucuaaaaaaaaaaaaaaaaaaaaaaaaaaaaaaaaaaaaaaaaaaaaaaaaaaaaaaaaaaaaaaaaugcaucccccccccccccccccccccccccccccccaaaggcucuuuucagagccaccagaauu

SEQ ID NO: 8902 - RNA, 1938 nt, Artificial Sequence
  mRNA Design a-1 (A64-N5-C30-hSL-N5) comprising derived and/or modified sequence from Pf(3D7)__XP_001351122.1__HsALB_Pf-CSP(19-384)_L(SGG)_Ferritin (opt3)
aggagagucccgcagucggcguccagcggcucugcuuguucgugugugugucguugcaggccuuauucaagcuuaccaugaagugggugaccuucaucagccugcucuuucuuuucuccucugccuacucacuguuucaggaguaucaaugcuacggcaguagcuccaacacaagagucuugaaugaauuaaacuaugacaaugcugggacuaaccuguacaaugagcuagaaaugaacuauuacggaaaacaggagaauugguauucucucaagaaaaacucgaggucacugggugaaaaugaugacggcaacaaugaggauaacgagaaacuucggaagcccaagcacaagaaacugaagcagccugcagacgggaauccagauccgaacgccaaucccaacguugacccuaacgcgaauccaaacguggaucccaaugcuaacccuaauguagacccaaacgccaaucccaacgcaaauccuaacgccaauccaaacgcuaauccgaacgcaaaucccaacgccaacccuaaugcuaacccaaaugccaaccccaaugcgaacccuaaugcaaacccaaaugccaaccccaaugcuaacccgaaugccaacccuaaugcaaaccccaacgcuaauccaaacgccaauccuaacgcgaaucccaacguggauccaaaugccaaccccaaugcaaacccuaaugcuaacccaaaugccaacccgaaugcuaaccccaacgccaauccuaacgcaaauccaaacgccaaucccaacgcuaauccuaacgcgaauccaaacgcaaaucccaacgccaauccgaacgcuaauccuaacgccaauccaaacgcaaaccccaaugccaacccuaaugcuaaccccaaugccaacccaaauaaaaacaaucagggaaacggccaaggucauaauaugccuaacgaccccaaucgcaacgucgaugaaaaugcaaacgcgaacagcgcugugaagaauaacaauaacgaggaaccaagugacaaacacauuaaggaguacuugaauaagauacagaacucccucucuacggaguggagcccguguuccguuaccugcgggaauggaauccaggugcgaauuaaaccuggcucagccaacaagcccaaagaugaacuggacuacgcaaaugacaucgagaagaaaauuuguaagauggaaaaaugcaguagcgucuucaacgugguaaauucuuccucaggcgggcugagcaaggauaucauaaagcucuuaaacgagcagguuaauaaagaaaugaacaguucuaaucuguauauguccaugagcucgugguguuacacacauucucuugacggagccgguuuguuucuguucgaucacgcugccgaggaguaugaacaugcaaagaaacuaaucauuuuucucaacgagaacaaugugccaguccaacugacuuccaucucagcucccgaacacaaguucgagggccuuacccagauuuuucagaaagccuacgaacacgagcagcauaucagugagagcauaaacaauauuguggaccacgcgaucaaguccaaggaucaugccacauucaacuuucugcaaugguauguggcugaacagcacgaggaagaggucuuguucaaagacauucucgauaagaucgaacugaucgggaaugagaaccacggauuauaccuggcagaccaguauguuaaaggcauugccaagucucguaaaagcugaggacuagucccuguucccagagcccacuuuuuuuucuuuuuuugaaauaaaauagccugucuuucagaucuaaaaaaaaaaaaaaaaaaaaaaaaaaaaaaaaaaaaaaaaaaaaaaaaaaaaaaaaaaaaaaaaugcaucccccccccccccccccccccccccccccccaaaggcucuuuucagagccaccagaauu

SEQ ID NO: 8903 - RNA, 1899 nt, Artificial Sequence
  mRNA Design a-1 (A64-N5-C30-hSL-N5) comprising derived and/or modified sequence from Pf(3D7)__XP_001351122.1__HsALB_Pf-CSP(93-384)_L(PVTN)_HBsAg (opt3)
aggagagucccgcagucggcguccagcggcucugcuuguucgugugugugucguugcaggccuuauucaagcuuaccaugaagugggugaccuucaucagccugcucuuucuuuucuccucugccuacucaaaacugaagcagcccgcugacggcaacccugauccaaaugcaaacccgaaugucgaccccaacgccaauccuaacguugauccaaaugcgaaccccaauguggacccuaacgcuaauccaaacgccaaucccaacgcaaauccuaacgccaacccaaaugcuaacccgaaugcaaaccccaaugccaacccuaaugcuaacccaaaugccaaccccaaugcgaacccuaaugcaaacccaaaugccaaccccaacgcuaauccgaacgccaauccuaacgcaaaucccaacgcuaauccaaacgccaauccuaacguagaucccaaugcgaacccaaaugccaaccccaaugcaaacccuaacgcuaauccaaacgccaauccgaacgcuaaucccaacgccaauccuaacgcaaauccaaacgccaaucccaacgcuaauccuaacgcgaauccaaacgcaaaccccaaugccaacccgaaugcuaacccuaaugccaacccaaaugcaaaccccaaugccaacccuaaugcuaaccccaauaaaaacaaucaagggaacggacagggucacaauaugccaaacgacccuaacagaaauguggaugagaacgccaaugcaaacagugcggucaagaauaacaauaacgaggaacccagcgacaaacauauuaaggaauauuugaauaagauacagaacuccuuaucuacagaguggucgccaugcucagugacuuguggcaaugggauccagguuaggauuaaaccgggaagcgcuaacaagccuaaagaugaacuggacuacgccaaugauaucgagaagaaaauuugcaagauggagaaguguaguuccguguuuaacgucguaaauucuagccccgugacgaacauggaaaacaucaccuccggcuuccuagguccacuccugguucuucaagcaggguuuuuccuguugacacggauacucacuaucccccagucacuggacaguugguggaccagccugaauuuucucggaggcucuccugugugcuuaggccagaacucccagucaccaacaagcaaucacagucccaccucuuguccuccgauuugcccaggguaucgcuggaugugucugcgacguuucaucauuuuucuuuucaucuugcugcuaugccucauauuucugcuuguccuguuggauuaccaaggaaugcuccccguguguccucugauuccagguuccacuacaaccaacacgggccccugcaaaacuuguaccacuccugcccaggggaauagcauguucccgucgugcugcuguacaaagcccaccgacggaaacugcacauguaucccaauuccuucuuccugggcuuuugccaaauauuuaugggagugggcaucagugagauucaguuggcugagccuccuuguccccuucguucagugguuugugggccuguccccaaccguaugguugucugcuaucuggaugaugugguacugggguccuagccuauauucaaucgugagucccuucauuccacugcucccgauauuuuucugccugugggucuacaucugaggacuagucccuguucccagagcccacuuuuuuuucuuuuuuugaaauaaaauagccugucuuucagaucuaaaaaaaaaaaaaaaaaaaaaaaaaaaaaaaaaaaaaaaaaaaaaaaaaaaaaaaaaaaaaaaaugcaucccccccccccccccccccccccccccccccaaaggcucuuuucagagccaccagaauu

SEQ ID NO: 8904 - RNA, 1560 nt, Artificial Sequence; identical to SEQ ID NO: 762
  mRNA Design a-1 (A64-N5-C30-hSL-N5) comprising derived and/or modified sequence from Pf(3D7)__XP_001351122.1__HsALB_Pf-CSP(199-377)_L(PVTN)_HBsAg (opt3)

SEQ ID NO: 8905 - RNA, 1257 nt, Artificial Sequence
  mRNA Design a-1 (A64-N5-C30-hSL-N5) comprising derived and/or modified sequence from Pf(3D7)__XP_001351122.1__HsALB_Pf-CSP(19-272)_L(AAY)_Pf-CSP(346-3 75)_L(AAY)_Pf-CSP(310-327) (opt3)
aggagagucccgcagucggcguccagcggcucugcuuguucgugugugugucguugcaggccuuauucaagcuuaccaugaagugggugaccuucaucagccugcucuuucuuuucuccucugccuacucacuguuucaggaguaucaaugcuacggcaguagcuccaacacaagagucuugaaugaauuaaacuaugacaaugcugggacuaaccuguacaaugagcuagaaaugaacuauuacggaaaacaggagaauugguauucucucaagaaaaacucgaggucacugggugaaaaugaugacggcaacaaugaggauaacgagaaacuucggaagcccaagcacaagaaacugaagcagccugcagacgggaauccagauccgaacgccaaucccaacguugacccuaacgcgaauccaaacguggaucccaaugcuaacccuaauguagacccaaacgccaaucccaacgcaaauccuaacgccaauccaaacgcuaauccgaacgcaaaucccaacgccaacccuaaugcuaacccaaaugccaaccccaaugcgaacccuaaugcaaacccaaaugccaaccccaaugcuaacccgaaugccaacccuaaugcaaaccccaacgcuaauccaaacgccaauccuaacgcgaaucccaacguggauccaaaugccaaccccaaugcaaacccuaaugcuaacccaaaugccaacccgaaugcuaaccccaacgccaauccuaacgcaaauccaaacgccaaucccaacgcuaauccuaacgcgaauccaaacgcaaaucccaacgccaauccgaacgcuaauccuaacgccaauccaaacgcaaaccccaaugccaacccuaaugcuaaccccaaugccaacccagcagcguacauuaaaccuggaagcgcuaauaagcccaaagacgaauuggauuacgccaacgacauagagaagaagaucuguaaaauggaaaagugcagugcagccuaugagccauccgauaaacauauuaaggaguaccucaauaaaauccagaacucucugugaggacuagucccuguucccagagcccacuuuuuuuucuuuuuuugaaauaaaauagccugucuuucagaucuaaaaaaaaaaaaaaaaaaaaaaaaaaaaaaaaaaaaaaaaaaaaaaaaaaaaaaaaaaaaaaaaugcaucccccccccccccccccccccccccccccccaaaggcucuuuucagagccaccagaauu

SEQ ID NO: 8906 - RNA, 1305 nt, Artificial Sequence
  mRNA Design a-1 (A64-N5-C30-hSL-N5) comprising derived and/or modified sequence from Pf(3D7)__XP_001351122.1__HsALB_Pf-CSP(19-272)_L(AAY)_Pf-CSP(346-3 75)_L(AAY)_Pf-CSP(310-327)_L(AAY)_PADRE (opt3)
aggagagucccgcagucggcguccagcggcucugcuuguucgugugugugucguugcaggccuuauucaagcuuaccaugaagugggugaccuucaucagccugcucuuucuuuucuccucugccuacucacuguuucaggaguaucaaugcuacggcaguagcuccaacacaagagucuugaaugaauuaaacuaugacaaugcugggacuaaccuguacaaugagcuagaaaugaacuauuacggaaaacaggagaauugguauucucucaagaaaaacucgaggucacugggugaaaaugaugacggcaacaaugaggauaacgagaaacuucggaagcccaagcacaagaaacugaagcagccugcagacgggaauccagauccgaacgccaaucccaacguugacccuaacgcgaauccaaacguggaucccaaugcuaacccuaauguagacccaaacgccaaucccaacgcaaauccuaacgccaauccaaacgcuaauccgaacgcaaaucccaacgccaacccuaaugcuaacccaaaugccaaccccaaugcgaacccuaaugcaaacccaaaugccaaccccaaugcuaacccgaaugccaacccuaaugcaaaccccaacgcuaauccaaacgccaauccuaacgcgaaucccaacguggauccaaaugccaaccccaaugcaaacccuaaugcuaacccaaaugccaacccgaaugcuaaccccaacgccaauccuaacgcaaauccaaacgccaaucccaacgcuaauccuaacgcgaauccaaacgcaaaucccaacgccaauccgaacgcuaauccuaacgccaauccaaacgcaaaccccaaugccaacccuaaugcuaaccccaaugccaacccagcagcguacauuaaaccuggaagcgcuaauaagcccaaagacgaauuggauuacgccaacgacauagagaagaagaucuguaaaauggaaaagugcagugcagccuaugagccauccgauaaacauauuaaggaguaccucaauaaaauccagaacucucuggcugccuaugcaaaguucgucgcugccuggacgcugaaagcggccgcuugaggacuagucccuguucccagagcccacuuuuuuuucuuuuuuugaaauaaaauagccugucuuucagaucuaaaaaaaaaaaaaaaaaaaaaaaaaaaaaaaaaaaaaaaaaaaaaaaaaaaaaaaaaaaaaaaaugcaucccccccccccccccccccccccccccccccaaaggcucuuuucagagccaccagaauu

SEQ ID NO: 8907 - RNA, 1305 nt, Artificial Sequence
  mRNA Design a-1 (A64-N5-C30-hSL-N5) comprising derived and/or modified sequence from Pf(3D7)__XP_001351122.1__HsALB_Pf-CSP(19-272)_L(AAY)_Pf-CSP(310-3 27)_L(AAY)_Pf-CSP(346-375)_L(AAY)_PADRE (opt3)
aggagagucccgcagucggcguccagcggcucugcuuguucgugugugugucguugcaggccuuauucaagcuuaccaugaagugggugaccuucaucagccugcucuuucuuuucuccucugccuacucacuguuucaggaguaucaaugcuacggcaguagcuccaacacaagagucuugaaugaauuaaacuaugacaaugcugggacuaaccuguacaaugagcuagaaaugaacuauuacggaaaacaggagaauugguauucucucaagaaaaacucgaggucacugggugaaaaugaugacggcaacaaugaggauaacgagaaacuucggaagcccaagcacaagaaacugaagcagccugcagacgggaauccagauccgaacgccaaucccaacguugacccuaacgcgaauccaaacguggaucccaaugcuaacccuaauguagacccaaacgccaaucccaacgcaaauccuaacgccaauccaaacgcuaauccgaacgcaaaucccaacgccaacccuaaugcuaacccaaaugccaaccccaaugcgaacccuaaugcaaacccaaaugccaaccccaaugcuaacccgaaugccaacccuaaugcaaaccccaacgcuaauccaaacgccaauccuaacgcgaaucccaacguggauccaaaugccaaccccaaugcaaacccuaaugcuaacccaaaugccaacccgaaugcuaaccccaacgccaauccuaacgcaaauccaaacgccaaucccaacgcuaauccuaacgcgaauccaaacgcaaaucccaacgccaauccgaacgcuaauccuaacgccaauccaaacgcaaaccccaaugccaacccuaaugcuaaccccaaugccaacccagcagcguacgaaccuagcgacaaacauauuaaggaguacuugaauaaaauacagaacagucucgcugccuauaucaagcccggauccgcaaauaagccaaaagaugaacuggacuacgccaacgauauugagaagaaaaucuguaagauggagaaaugcucugcugccuaugcaaaguucgucgcugccuggacgcugaaagcggccgcuugaggacuagucccuguucccagagcccacuuuuuuuucuuuuuuugaaauaaaauagccugucuuucagaucuaaaaaaaaaaaaaaaaaaaaaaaaaaaaaaaaaaaaaaaaaaaaaaaaaaaaaaaaaaaaaaaaugcaucccccccccccccccccccccccccccccccaaaggcucuuuucagagccaccagaauu

SEQ ID NO: 8908 - RNA, 1359 nt, Artificial Sequence
  mRNA Design a-1 (A64-N5-C30-hSL-N5) comprising derived and/or modified sequence from Pf(3D7)__XP_001351122.1__HsALB_Pf-CSP(19-272)_L(AAY)_Pf-CSP(310-3 27)_L(AAY)_Pf-CSP(346-375)_L(AAY)_PADRE_L(AAY)_P2 (opt3)
aggagagucccgcagucggcguccagcggcucugcuuguucgugugugugucguugcaggccuuauucaagcuuaccaugaagugggugaccuucaucagccugcucuuucuuuucuccucugccuacucacuguuucaggaguaucaaugcuacggcaguagcuccaacacaagagucuugaaugaauuaaacuaugacaaugcugggacuaaccuguacaaugagcuagaaaugaacuauuacggaaaacaggagaauugguauucucucaagaaaaacucgaggucacugggugaaaaugaugacggcaacaaugaggauaacgagaaacuucggaagcccaagcacaagaaacugaagcagccugcagacgggaauccagauccgaacgccaaucccaacguugacccuaacgcgaauccaaacguggaucccaaugcuaacccuaauguagacccaaacgccaaucccaacgcaaauccuaacgccaauccaaacgcuaauccgaacgcaaaucccaacgccaacccuaaugcuaacccaaaugccaaccccaaugcgaacccuaaugcaaacccaaaugccaaccccaaugcuaacccgaaugccaacccuaaugcaaaccccaacgcuaauccaaacgccaauccuaacgcgaaucccaacguggauccaaaugccaaccccaaugcaaacccuaaugcuaacccaaaugccaacccgaaugcuaaccccaacgccaauccuaacgcaaauccaaacgccaaucccaacgcuaauccuaacgcgaauccaaacgcaaaucccaacgccaauccgaacgcuaauccuaacgccaauccaaacgcaaaccccaaugccaacccuaaugcuaaccccaaugccaacccagcagcguacgaaccuagcgacaaacauauuaaggaguacuugaauaaaauacagaacagucucgcugccuauaucaagcccggauccgcaaauaagccaaaagaugaacuggacuacgccaacgauauugagaagaaaaucuguaagauggagaaaugcucugcugccuaugcaaaguucgucgcugccuggacgcugaaagcggccgcugcagccuaccaauauauuaaggcuaauagcaaguuuaucggcauaaccgaacucugaggacuagucccuguucccagagcccacuuuuuuuucuuuuuuugaaauaaaauagccugucuuucagaucuaaaaaaaaaaaaaaaaaaaaaaaaaaaaaaaaaaaaaaaaaaaaaaaaaaaaaaaaaaaaaaaaugcaucccccccccccccccccccccccccccccccaaaggcucuuuucagagccaccagaauu

SEQ ID NO: 8909 - RNA, 1323 nt, Artificial Sequence
  mRNA Design a-1 (A64-N5-C30-hSL-N5) comprising derived and/or modified sequence from Pf(3D7)__XP_001351122.1__HsALB_Pf-CSP(19-272)_L(AAY)_Pf-CSP(310-3 27)_Linker (AAY)_Pf-CSP(346-397) (opt3)
aggagagucccgcagucggcguccagcggcucugcuuguucgugugugugucguugcaggccuuauucaagcuuaccaugaagugggugaccuucaucagccugcucuuucuuuucuccucugccuacucacuguuucaggaguaucaaugcuacggcaguagcuccaacacaagagucuugaaugaauuaaacuaugacaaugcugggacuaaccuguacaaugagcuagaaaugaacuauuacggaaaacaggagaauugguauucucucaagaaaaacucgaggucacugggugaaaaugaugacggcaacaaugaggauaacgagaaguuacggaaacccaagcacaagaaacugaagcagccugcagacgggaauccagauccgaacgccaaucccaacguugacccuaacgcgaauccaaacguggaucccaaugcuaacccuaauguagacccaaacgccaaucccaacgcaaauccuaacgccaauccaaacgcuaauccgaacgcaaaucccaacgccaacccuaaugcuaacccaaaugccaaccccaaugcgaacccuaaugcaaacccaaaugccaaccccaaugcuaacccgaaugccaacccuaaugcaaaccccaacgcuaauccaaacgccaauccuaacgcgaaucccaacguggauccaaaugccaaccccaaugcaaacccuaaugcuaacccaaaugccaacccgaaugcuaaccccaacgccaauccuaacgcaaauccaaacgccaaucccaacgcuaauccuaacgcgaauccaaacgcaaaucccaacgccaauccgaacgcuaauccuaacgccaauccaaacgcaaaccccaaugccaacccuaaugcuaaccccaaugccaacccagcagcguacgaaccuagcgacaaacauauuaaggaguacuugaauaaaauacagaacagucucgcugccuauaucaagcccggauccgcaaauaagccaaaagaugaacuggacuacgccaacgauauugagaagaaaaucuguaagauggagaaaugcucuagcgucuucaaugugguuaacuccucaauuggccugaucauggugcucaguuuucuuuuccugaauugaggacuagucccuguucccagagcccacuuuuuuuucuuuuuuugaaauaaaauagccugucuuucagaucuaaaaaaaaaaaaaaaaaaaaaaaaaaaaaaaaaaaaaaaaaaaaaaaaaaaaaaaaaaaaaaaaugcaucccccccccccccccccccccccccccccccaaaggcucuuuucagagccaccagaauu

SEQ ID NO: 8910 - RNA, 1923 nt, Artificial Sequence
  mRNA Design a-1 (A64-N5-C30-hSL-N5) comprising derived and/or modified sequence from Pf(3D7)__XP_001351122.1__LumSynt_L(GGS4-GGG)_Pf-CSP(19-397) (opt4)
aggagagucccgcagucggcguccagcggcucugcuuguucgugugugugucguugcaggccuuauucaagcuuaccaugcagaucuacgagggcaagcugaccgccgagggccugagauucggcaucguggccagcagauucaaccacgcccugguggacagacugguggagggcgccaucgacgccaucgugagacacggcggcagagaggaggacaucacccuggugagagugcccggcagcugggagauccccguggccgccggcgagcuggccagaaaggaggacaucgacgccgugaucgccaucggcgugcugaucagaggcgccaccccccacuucgacuacaucgccagcgaggugagcaagggccuggccgaccugagccuggagcugagaaagcccaucaccuucggcgugaucaccgccgacacccuggagcaggccaucgagagagccggcaccaagcacggcaacaagggcugggaggccgcccugagcgccaucgagauggccaaccuguucaagagccugagaggcggcagcggcggcagcggcggcagcggcggcagcggcggcggccuguuccaggaguaccagugcuacggcagcagcagcaacaccagagugcugaacgagcugaacuacgacaacgccggcaccaaccuguacaacgagcuggagaugaacuacuacggcaagcaggagaacugguacagccugaagaagaacagcagaagccugggcgagaacgacgacggcaacaacgaggacaacgagaagcugagaaagcccaagcacaagaagcugaagcagcccgccgacggcaaccccgaccccaacgccaaccccaacguggaccccaacgccaaccccaacguggaccccaacgccaaccccaacguggaccccaacgccaaccccaacgccaaccccaacgccaaccccaacgccaaccccaacgccaaccccaacgccaaccccaacgccaaccccaacgccaaccccaacgccaaccccaacgccaaccccaacgccaaccccaacgccaaccccaacgccaaccccaacgccaaccccaacgccaaccccaacgccaaccccaacgccaaccccaacguggaccccaacgccaaccccaacgccaaccccaacgccaaccccaacgccaaccccaacgccaaccccaacgccaaccccaacgccaaccccaacgccaaccccaacgccaaccccaacgccaaccccaacgccaaccccaacgccaaccccaacgccaaccccaacgccaaccccaacgccaaccccaacgccaaccccaacgccaaccccaacgccaaccccaacaagaacaaccagggcaacggccagggccacaacaugcccaacgaccccaacagaaacguggacgagaacgccaacgccaacagcgccgugaagaacaacaacaacgaggagcccagcgacaagcacaucaaggaguaccugaacaagauccagaacagccugagcaccgaguggagccccugcagcgugaccugcggcaacggcauccaggugagaaucaagcccggcagcgccaacaagcccaaggacgagcuggacuacgccaacgacaucgagaagaagaucugcaagauggagaagugcagcagcguguucaacguggugaacagcagcaucggccugaucauggugcugagcuuccuguuccugaacugaggacuagucccuguucccagagcccacuuuuuuuucuuuuuuugaaauaaaauagccugucuuucagaucuaaaaaaaaaaaaaaaaaaaaaaaaaaaaaaaaaaaaaaaaaaaaaaaaaaaaaaaaaaaaaaaaugcaucccccccccccccccccccccccccccccccaaaggcucuuuucagagccaccagaauu

SEQ ID NO: 8911 - RNA, 1785 nt, Artificial Sequence
  mRNA Design a-1 (A64-N5-C30-hSL-N5) comprising derived and/or modified sequence from Pf(3D7)__XP_001351122.1__HsALB_Pf-CSP(19-272)_L(PVTN)_HBsAg (opt4)
aggagagucccgcagucggcguccagcggcucugcuuguucgugugugugucguugcaggccuuauucaagcuuaccaugaagugggugaccuucaucagccugcuguuccuguucagcagcgccuacagccuguuccaggaguaccagugcuacggcagcagcagcaacaccagagugcugaacgagcugaacuacgacaacgccggcaccaaccuguacaacgagcuggagaugaacuacuacggcaagcaggagaacugguacagccugaagaagaacagcagaagccugggcgagaacgacgacggcaacaacgaggacaacgagaagcugagaaagcccaagcacaagaagcugaagcagcccgccgacggcaaccccgaccccaacgccaaccccaacguggaccccaacgccaaccccaacguggaccccaacgccaaccccaacguggaccccaacgccaaccccaacgccaaccccaacgccaaccccaacgccaaccccaacgccaaccccaacgccaaccccaacgccaaccccaacgccaaccccaacgccaaccccaacgccaaccccaacgccaaccccaacgccaaccccaacgccaaccccaacgccaaccccaacgccaaccccaacgccaaccccaacgccaaccccaacguggaccccaacgccaaccccaacgccaaccccaacgccaaccccaacgccaaccccaacgccaaccccaacgccaaccccaacgccaaccccaacgccaaccccaacgccaaccccaacgccaaccccaacgccaaccccaacgccaaccccaacgccaaccccaacgccaaccccaacgccaaccccaacgccaaccccaacgccaaccccaacgccaacccccccgugaccaacauggagaacaucaccagcggcuuccugggcccccugcuggugcugcaggccggcuucuuccugcugaccagaauccugaccaucccccagagccuggacagcugguggaccagccugaacuuccugggcggcagccccgugugccugggccagaacagccagagccccaccagcaaccacagccccaccagcugcccccccaucugccccggcuacagauggaugugccugagaagauucaucaucuuccuguucauccugcugcugugccugaucuuccugcuggugcugcuggacuaccagggcaugcugcccgugugcccccugauccccggcagcaccaccaccaacaccggccccugcaagaccugcaccacccccgcccagggcaacagcauguuccccagcugcugcugcaccaagcccaccgacggcaacugcaccugcauccccauccccagcagcugggccuucgccaaguaccugugggagugggccagcgugagauucagcuggcugagccugcuggugcccuucgugcagugguucgugggccugagccccaccguguggcugagcgccaucuggaugaugugguacuggggccccagccuguacagcaucgugagccccuucaucccccugcugcccaucuucuucugccuguggguguacaucugaggacuagucccuguucccagagcccacuuuuuuuucuuuuuuugaaauaaaauagccugucuuucagaucuaaaaaaaaaaaaaaaaaaaaaaaaaaaaaaaaaaaaaaaaaaaaaaaaaaaaaaaaaaaaaaaaugcaucccccccccccccccccccccccccccccccaaaggcucuuuucagagccaccagaauu

SEQ ID NO: 8912 - RNA, 1902 nt, Artificial Sequence
  mRNA Design a-1 (A64-N5-C30-hSL-N5) comprising derived and/or modified sequence from Pf(3D7)__XP_001351122.1__HsALB_Pf-CSP(19-272)_L(AAY)_Pf-CSP(346-3 65)_L(AAY)_PADRE_L(PVTN)_HBsAg (opt4)
aggagagucccgcagucggcguccagcggcucugcuuguucgugugugugucguugcaggccuuauucaagcuuaccaugaagugggugaccuucaucagccugcuguuccuguucagcagcgccuacagccuguuccaggaguaccagugcuacggcagcagcagcaacaccagagugcugaacgagcugaacuacgacaacgccggcaccaaccuguacaacgagcuggagaugaacuacuacggcaagcaggagaacugguacagccugaagaagaacagcagaagccugggcgagaacgacgacggcaacaacgaggacaacgagaagcugagaaagcccaagcacaagaagcugaagcagcccgccgacggcaaccccgaccccaacgccaaccccaacguggaccccaacgccaaccccaacguggaccccaacgccaaccccaacguggaccccaacgccaaccccaacgccaaccccaacgccaaccccaacgccaaccccaacgccaaccccaacgccaaccccaacgccaaccccaacgccaaccccaacgccaaccccaacgccaaccccaacgccaaccccaacgccaaccccaacgccaaccccaacgccaaccccaacgccaaccccaacgccaaccccaacgccaaccccaacguggaccccaacgccaaccccaacgccaaccccaacgccaaccccaacgccaaccccaacgccaaccccaacgccaaccccaacgccaaccccaacgccaaccccaacgccaaccccaacgccaaccccaacgccaaccccaacgccaaccccaacgccaaccccaacgccaaccccaacgccaaccccaacgccaaccccaacgccaaccccaacgccaaccccgccgccuacaucaagcccggcagcgccaacaagcccaaggacgagcuggacuacgccaacgacaucgaggccgccuacgccaaguucguggccgccuggacccugaaggccgccgcccccgugaccaacauggagaacaucaccagcggcuuccugggcccccugcuggugcugcaggccggcuucuuccugcugaccagaauccugaccaucccccagagccuggacagcugguggaccagccugaacuuccugggcggcagccccgugugccugggccagaacagccagagccccaccagcaaccacagccccaccagcugcccccccaucugccccggcuacagauggaugugccugagaagauucaucaucuuccuguucauccugcugcugugccugaucuuccugcuggugcugcuggacuaccagggcaugcugcccgugugcccccugauccccggcagcaccaccaccaacaccggccccugcaagaccugcaccacccccgcccagggcaacagcauguuccccagcugcugcugcaccaagcccaccgacggcaacugcaccugcauccccauccccagcagcugggccuucgccaaguaccugugggagugggccagcgugagauucagcuggcugagccugcuggugcccuucgugcagugguucgugggccugagccccaccguguggcugagcgccaucuggaugaugugguacuggggccccagccuguacagcaucgugagccccuucaucccccugcugcccaucuucuucugccuguggguguacaucugaggacuagucccuguucccagagcccacuuuuuuuucuuuuuuugaaauaaaauagccugucuuucagaucuaaaaaaaaaaaaaaaaaaaaaaaaaaaaaaaaaaaaaaaaaaaaaaaaaaaaaaaaaaaaaaaaugcaucccccccccccccccccccccccccccccccaaaggcucuuuucagagccaccagaauu

SEQ ID NO: 8913 - RNA, 2121 nt, Artificial Sequence
  mRNA Design a-1 (A64-N5-C30-hSL-N5) comprising derived and/or modified sequence from Pf(3D7)__XP_001351122.1__HsALB_Pf-CSP(19-384)_L(PVTN)_HBsAg (opt4)
aggagagucccgcagucggcguccagcggcucugcuuguucgugugugugucguugcaggccuuauucaagcuuaccaugaagugggugaccuucaucagccugcuguuccuguucagcagcgccuacagccuguuccaggaguaccagugcuacggcagcagcagcaacaccagagugcugaacgagcugaacuacgacaacgccggcaccaaccuguacaacgagcuggagaugaacuacuacggcaagcaggagaacugguacagccugaagaagaacagcagaagccugggcgagaacgacgacggcaacaacgaggacaacgagaagcugagaaagcccaagcacaagaagcugaagcagcccgccgacggcaaccccgaccccaacgccaaccccaacguggaccccaacgccaaccccaacguggaccccaacgccaaccccaacguggaccccaacgccaaccccaacgccaaccccaacgccaaccccaacgccaaccccaacgccaaccccaacgccaaccccaacgccaaccccaacgccaaccccaacgccaaccccaacgccaaccccaacgccaaccccaacgccaaccccaacgccaaccccaacgccaaccccaacgccaaccccaacgccaaccccaacgccaaccccaacguggaccccaacgccaaccccaacgccaaccccaacgccaaccccaacgccaaccccaacgccaaccccaacgccaaccccaacgccaaccccaacgccaaccccaacgccaaccccaacgccaaccccaacgccaaccccaacgccaaccccaacgccaaccccaacgccaaccccaacgccaaccccaacgccaaccccaacgccaaccccaacgccaaccccaacaagaacaaccagggcaacggccagggccacaacaugcccaacgaccccaacagaaacguggacgagaacgccaacgccaacagcgccgugaagaacaacaacaacgaggagcccagcgacaagcacaucaaggaguaccugaacaagauccagaacagccugagcaccgaguggagccccugcagcgugaccugcggcaacggcauccaggugagaaucaagcccggcagcgccaacaagcccaaggacgagcuggacuacgccaacgacaucgagaagaagaucugcaagauggagaagugcagcagcguguucaacguggugaacagcagccccgugaccaacauggagaacaucaccagcggcuuccugggcccccugcuggugcugcaggccggcuucuuccugcugaccagaauccugaccaucccccagagccuggacagcugguggaccagccugaacuuccugggcggcagccccgugugccugggccagaacagccagagccccaccagcaaccacagccccaccagcugcccccccaucugccccggcuacagauggaugugccugagaagauucaucaucuuccuguucauccugcugcugugccugaucuuccugcuggugcugcuggacuaccagggcaugcugcccgugugcccccugauccccggcagcaccaccaccaacaccggccccugcaagaccugcaccacccccgcccagggcaacagcauguuccccagcugcugcugcaccaagcccaccgacggcaacugcaccugcauccccauccccagcagcugggccuucgccaaguaccugugggagugggccagcgugagauucagcuggcugagccugcuggugcccuucgugcagugguucgugggccugagccccaccguguggcugagcgccaucuggaugaugugguacuggggccccagccuguacagcaucgugagccccuucaucccccugcugcccaucuucuucugccuguggguguacaucugaggacuagucccuguucccagagcccacuuuuuuuucuuuuuuugaaauaaaauagccugucuuucagaucuaaaaaaaaaaaaaaaaaaaaaaaaaaaaaaaaaaaaaaaaaaaaaaaaaaaaaaaaaaaaaaaaugcaucccccccccccccccccccccccccccccccaaaggcucuuuucagagccaccagaauu

SEQ ID NO: 8914 - RNA, 1938 nt, Artificial Sequence
  mRNA Design a-1 (A64-N5-C30-hSL-N5) comprising derived and/or modified sequence from Pf(3D7)__XP_001351122.1__HsALB_Pf-CSP(19-384)_L(SGG)_Ferritin (opt4)
aggagagucccgcagucggcguccagcggcucugcuuguucgugugugugucguugcaggccuuauucaagcuuaccaugaagugggugaccuucaucagccugcuguuccuguucagcagcgccuacagccuguuccaggaguaccagugcuacggcagcagcagcaacaccagagugcugaacgagcugaacuacgacaacgccggcaccaaccuguacaacgagcuggagaugaacuacuacggcaagcaggagaacugguacagccugaagaagaacagcagaagccugggcgagaacgacgacggcaacaacgaggacaacgagaagcugagaaagcccaagcacaagaagcugaagcagcccgccgacggcaaccccgaccccaacgccaaccccaacguggaccccaacgccaaccccaacguggaccccaacgccaaccccaacguggaccccaacgccaaccccaacgccaaccccaacgccaaccccaacgccaaccccaacgccaaccccaacgccaaccccaacgccaaccccaacgccaaccccaacgccaaccccaacgccaaccccaacgccaaccccaacgccaaccccaacgccaaccccaacgccaaccccaacgccaaccccaacgccaaccccaacgccaaccccaacguggaccccaacgccaaccccaacgccaaccccaacgccaaccccaacgccaaccccaacgccaaccccaacgccaaccccaacgccaaccccaacgccaaccccaacgccaaccccaacgccaaccccaacgccaaccccaacgccaaccccaacgccaaccccaacgccaaccccaacgccaaccccaacgccaaccccaacgccaaccccaacgccaaccccaacaagaacaaccagggcaacggccagggccacaacaugcccaacgaccccaacagaaacguggacgagaacgccaacgccaacagcgccgugaagaacaacaacaacgaggagcccagcgacaagcacaucaaggaguaccugaacaagauccagaacagccugagcaccgaguggagccccugcagcgugaccugcggcaacggcauccaggugagaaucaagcccggcagcgccaacaagcccaaggacgagcuggacuacgccaacgacaucgagaagaagaucugcaagauggagaagugcagcagcguguucaacguggugaacagcagcagcggcggccugagcaaggacaucaucaagcugcugaacgagcaggugaacaaggagaugaacagcagcaaccuguacaugagcaugagcagcuggugcuacacccacagccuggacggcgccggccuguuccuguucgaccacgccgccgaggaguacgagcacgccaagaagcugaucaucuuccugaacgagaacaacgugcccgugcagcugaccagcaucagcgcccccgagcacaaguucgagggccugacccagaucuuccagaaggccuacgagcacgagcagcacaucagcgagagcaucaacaacaucguggaccacgccaucaagagcaaggaccacgccaccuucaacuuccugcagugguacguggccgagcagcacgaggaggaggugcuguucaaggacauccuggacaagaucgagcugaucggcaacgagaaccacggccuguaccuggccgaccaguacgugaagggcaucgccaagagcagaaagagcugaggacuagucccuguucccagagcccacuuuuuuuucuuuuuuugaaauaaaauagccugucuuucagaucuaaaaaaaaaaaaaaaaaaaaaaaaaaaaaaaaaaaaaaaaaaaaaaaaaaaaaaaaaaaaaaaaugcaucccccccccccccccccccccccccccccccaaaggcucuuuucagagccaccagaauu

SEQ ID NO: 8915 - RNA, 1899 nt, Artificial Sequence
  mRNA Design a-1 (A64-N5-C30-hSL-N5) comprising derived and/or modified sequence from Pf(3D7)__XP_001351122.1__HsALB_Pf-CSP(93-384)_L(PVTN)_HBsAg (opt4)
aggagagucccgcagucggcguccagcggcucugcuuguucgugugugugucguugcaggccuuauucaagcuuaccaugaagugggugaccuucaucagccugcuguuccuguucagcagcgccuacagcaagcugaagcagcccgccgacggcaaccccgaccccaacgccaaccccaacguggaccccaacgccaaccccaacguggaccccaacgccaaccccaacguggaccccaacgccaaccccaacgccaaccccaacgccaaccccaacgccaaccccaacgccaaccccaacgccaaccccaacgccaaccccaacgccaaccccaacgccaaccccaacgccaaccccaacgccaaccccaacgccaaccccaacgccaaccccaacgccaaccccaacgccaaccccaacgccaaccccaacgccaaccccaacguggaccccaacgccaaccccaacgccaaccccaacgccaaccccaacgccaaccccaacgccaaccccaacgccaaccccaacgccaaccccaacgccaaccccaacgccaaccccaacgccaaccccaacgccaaccccaacgccaaccccaacgccaaccccaacgccaaccccaacgccaaccccaacgccaaccccaacgccaaccccaacgccaaccccaacaagaacaaccagggcaacggccagggccacaacaugcccaacgaccccaacagaaacguggacgagaacgccaacgccaacagcgccgugaagaacaacaacaacgaggagcccagcgacaagcacaucaaggaguaccugaacaagauccagaacagccugagcaccgaguggagccccugcagcgugaccugcggcaacggcauccaggugagaaucaagcccggcagcgccaacaagcccaaggacgagcuggacuacgccaacgacaucgagaagaagaucugcaagauggagaagugcagcagcguguucaacguggugaacagcagccccgugaccaacauggagaacaucaccagcggcuuccugggcccccugcuggugcugcaggccggcuucuuccugcugaccagaauccugaccaucccccagagccuggacagcugguggaccagccugaacuuccugggcggcagccccgugugccugggccagaacagccagagccccaccagcaaccacagccccaccagcugcccccccaucugccccggcuacagauggaugugccugagaagauucaucaucuuccuguucauccugcugcugugccugaucuuccugcuggugcugcuggacuaccagggcaugcugcccgugugcccccugauccccggcagcaccaccaccaacaccggccccugcaagaccugcaccacccccgcccagggcaacagcauguuccccagcugcugcugcaccaagcccaccgacggcaacugcaccugcauccccauccccagcagcugggccuucgccaaguaccugugggagugggccagcgugagauucagcuggcugagccugcuggugcccuucgugcagugguucgugggccugagccccaccguguggcugagcgccaucuggaugaugugguacuggggccccagccuguacagcaucgugagccccuucaucccccugcugcccaucuucuucugccuguggguguacaucugaggacuagucccuguucccagagcccacuuuuuuuucuuuuuuugaaauaaaauagccugucuuucagaucuaaaaaaaaaaaaaaaaaaaaaaaaaaaaaaaaaaaaaaaaaaaaaaaaaaaaaaaaaaaaaaaaugcaucccccccccccccccccccccccccccccccaaaggcucuuuucagagccaccagaauu

SEQ ID NO: 8916 - RNA, 1560 nt, Artificial Sequence; identical to SEQ ID NO: 798
  mRNA Design a-1 (A64-N5-C30-hSL-N5) comprising derived and/or modified sequence from Pf(3D7)__XP_001351122.1__HsALB_Pf-CSP(199-377)_L(PVTN)_HBsAg (opt4)

SEQ ID NO: 8917 - RNA, 1257 nt, Artificial Sequence
  mRNA Design a-1 (A64-N5-C30-hSL-N5) comprising derived and/or modified sequence from Pf(3D7)__XP_001351122.1__HsALB_Pf-CSP(19-272)_L(AAY)_Pf-CSP(346-3 75)_L(AAY)_Pf-CSP(310-327) (opt4)
aggagagucccgcagucggcguccagcggcucugcuuguucgugugugugucguugcaggccuuauucaagcuuaccaugaagugggugaccuucaucagccugcuguuccuguucagcagcgccuacagccuguuccaggaguaccagugcuacggcagcagcagcaacaccagagugcugaacgagcugaacuacgacaacgccggcaccaaccuguacaacgagcuggagaugaacuacuacggcaagcaggagaacugguacagccugaagaagaacagcagaagccugggcgagaacgacgacggcaacaacgaggacaacgagaagcugagaaagcccaagcacaagaagcugaagcagcccgccgacggcaaccccgaccccaacgccaaccccaacguggaccccaacgccaaccccaacguggaccccaacgccaaccccaacguggaccccaacgccaaccccaacgccaaccccaacgccaaccccaacgccaaccccaacgccaaccccaacgccaaccccaacgccaaccccaacgccaaccccaacgccaaccccaacgccaaccccaacgccaaccccaacgccaaccccaacgccaaccccaacgccaaccccaacgccaaccccaacgccaaccccaacgccaaccccaacguggaccccaacgccaaccccaacgccaaccccaacgccaaccccaacgccaaccccaacgccaaccccaacgccaaccccaacgccaaccccaacgccaaccccaacgccaaccccaacgccaaccccaacgccaaccccaacgccaaccccaacgccaaccccaacgccaaccccaacgccaaccccaacgccaaccccaacgccaaccccaacgccaaccccgccgccuacaucaagcccggcagcgccaacaagcccaaggacgagcuggacuacgccaacgacaucgagaagaagaucugcaagauggagaagugcagcgccgccuacgagcccagcgacaagcacaucaaggaguaccugaacaagauccagaacagccugugaggacuagucccuguucccagagcccacuuuuuuuucuuuuuuugaaauaaaauagccugucuuucagaucuaaaaaaaaaaaaaaaaaaaaaaaaaaaaaaaaaaaaaaaaaaaaaaaaaaaaaaaaaaaaaaaaugcaucccccccccccccccccccccccccccccccaaaggcucuuuucagagccaccagaauu

SEQ ID NO: 8918 - RNA, 1305 nt, Artificial Sequence
  mRNA Design a-1 (A64-N5-C30-hSL-N5) comprising derived and/or modified sequence from Pf(3D7)__XP_001351122.1__HsALB_Pf-CSP(19-272)_L(AAY)_Pf-CSP(346-3 75)_L(AAY)_Pf-CSP(310-327)_L(AAY)_PADRE (opt4)
aggagagucccgcagucggcguccagcggcucugcuuguucgugugugugucguugcaggccuuauucaagcuuaccaugaagugggugaccuucaucagccugcuguuccuguucagcagcgccuacagccuguuccaggaguaccagugcuacggcagcagcagcaacaccagagugcugaacgagcugaacuacgacaacgccggcaccaaccuguacaacgagcuggagaugaacuacuacggcaagcaggagaacugguacagccugaagaagaacagcagaagccugggcgagaacgacgacggcaacaacgaggacaacgagaagcugagaaagcccaagcacaagaagcugaagcagcccgccgacggcaaccccgaccccaacgccaaccccaacguggaccccaacgccaaccccaacguggaccccaacgccaaccccaacguggaccccaacgccaaccccaacgccaaccccaacgccaaccccaacgccaaccccaacgccaaccccaacgccaaccccaacgccaaccccaacgccaaccccaacgccaaccccaacgccaaccccaacgccaaccccaacgccaaccccaacgccaaccccaacgccaaccccaacgccaaccccaacgccaaccccaacgccaaccccaacguggaccccaacgccaaccccaacgccaaccccaacgccaaccccaacgccaaccccaacgccaaccccaacgccaaccccaacgccaaccccaacgccaaccccaacgccaaccccaacgccaaccccaacgccaaccccaacgccaaccccaacgccaaccccaacgccaaccccaacgccaaccccaacgccaaccccaacgccaaccccaacgccaaccccgccgccuacaucaagcccggcagcgccaacaagcccaaggacgagcuggacuacgccaacgacaucgagaagaagaucugcaagauggagaagugcagcgccgccuacgagcccagcgacaagcacaucaaggaguaccugaacaagauccagaacagccuggccgccuacgccaaguucguggccgccuggacccugaaggccgccgccugaggacuagucccuguucccagagcccacuuuuuuuucuuuuuuugaaauaaaauagccugucuuucagaucuaaaaaaaaaaaaaaaaaaaaaaaaaaaaaaaaaaaaaaaaaaaaaaaaaaaaaaaaaaaaaaaaugcaucccccccccccccccccccccccccccccccaaaggcucuuuucagagccaccagaauu

SEQ ID NO: 8919 - RNA, 1305 nt, Artificial Sequence
  mRNA Design a-1 (A64-N5-C30-hSL-N5) comprising derived and/or modified sequence from Pf(3D7)__XP_001351122.1__HsALB_Pf-CSP(19-272)_L(AAY)_Pf-CSP(310-3 27)_L(AAY)_Pf-CSP(346-375)_L(AAY)_PADRE (opt4)
aggagagucccgcagucggcguccagcggcucugcuuguucgugugugugucguugcaggccuuauucaagcuuaccaugaagugggugaccuucaucagccugcuguuccuguucagcagcgccuacagccuguuccaggaguaccagugcuacggcagcagcagcaacaccagagugcugaacgagcugaacuacgacaacgccggcaccaaccuguacaacgagcuggagaugaacuacuacggcaagcaggagaacugguacagccugaagaagaacagcagaagccugggcgagaacgacgacggcaacaacgaggacaacgagaagcugagaaagcccaagcacaagaagcugaagcagcccgccgacggcaaccccgaccccaacgccaaccccaacguggaccccaacgccaaccccaacguggaccccaacgccaaccccaacguggaccccaacgccaaccccaacgccaaccccaacgccaaccccaacgccaaccccaacgccaaccccaacgccaaccccaacgccaaccccaacgccaaccccaacgccaaccccaacgccaaccccaacgccaaccccaacgccaaccccaacgccaaccccaacgccaaccccaacgccaaccccaacgccaaccccaacgccaaccccaacguggaccccaacgccaaccccaacgccaaccccaacgccaaccccaacgccaaccccaacgccaaccccaacgccaaccccaacgccaaccccaacgccaaccccaacgccaaccccaacgccaaccccaacgccaaccccaacgccaaccccaacgccaaccccaacgccaaccccaacgccaaccccaacgccaaccccaacgccaaccccaacgccaaccccgccgccuacgagcccagcgacaagcacaucaaggaguaccugaacaagauccagaacagccuggccgccuacaucaagcccggcagcgccaacaagcccaaggacgagcuggacuacgccaacgacaucgagaagaagaucugcaagauggagaagugcagcgccgccuacgccaaguucguggccgccuggacccugaaggccgccgccugaggacuagucccuguucccagagcccacuuuuuuuucuuuuuuugaaauaaaauagccugucuuucagaucuaaaaaaaaaaaaaaaaaaaaaaaaaaaaaaaaaaaaaaaaaaaaaaaaaaaaaaaaaaaaaaaaugcaucccccccccccccccccccccccccccccccaaaggcucuuuucagagccaccagaauu

SEQ ID NO: 8920 - RNA, 1359 nt, Artificial Sequence
  mRNA Design a-1 (A64-N5-C30-hSL-N5) comprising derived and/or modified sequence from Pf(3D7)__XP_001351122.1__HsALB_Pf-CSP(19-272)_L(AAY)_Pf-CSP(310-3 27)_L(AAY)_Pf-CSP(346-375)_L(AAY)_PADRE_L(AAY)_P2 (opt4)
aggagagucccgcagucggcguccagcggcucugcuuguucgugugugugucguugcaggccuuauucaagcuuaccaugaagugggugaccuucaucagccugcuguuccuguucagcagcgccuacagccuguuccaggaguaccagugcuacggcagcagcagcaacaccagagugcugaacgagcugaacuacgacaacgccggcaccaaccuguacaacgagcuggagaugaacuacuacggcaagcaggagaacugguacagccugaagaagaacagcagaagccugggcgagaacgacgacggcaacaacgaggacaacgagaagcugagaaagcccaagcacaagaagcugaagcagcccgccgacggcaaccccgaccccaacgccaaccccaacguggaccccaacgccaaccccaacguggaccccaacgccaaccccaacguggaccccaacgccaaccccaacgccaaccccaacgccaaccccaacgccaaccccaacgccaaccccaacgccaaccccaacgccaaccccaacgccaaccccaacgccaaccccaacgccaaccccaacgccaaccccaacgccaaccccaacgccaaccccaacgccaaccccaacgccaaccccaacgccaaccccaacgccaaccccaacguggaccccaacgccaaccccaacgccaaccccaacgccaaccccaacgccaaccccaacgccaaccccaacgccaaccccaacgccaaccccaacgccaaccccaacgccaaccccaacgccaaccccaacgccaaccccaacgccaaccccaacgccaaccccaacgccaaccccaacgccaaccccaacgccaaccccaacgccaaccccaacgccaaccccgccgccuacgagcccagcgacaagcacaucaaggaguaccugaacaagauccagaacagccuggccgccuacaucaagcccggcagcgccaacaagcccaaggacgagcuggacuacgccaacgacaucgagaagaagaucugcaagauggagaagugcagcgccgccuacgccaaguucguggccgccuggacccugaaggccgccgccgccgccuaccaguacaucaaggccaacagcaaguucaucggcaucaccgagcugugaggacuagucccuguucccagagcccacuuuuuuuucuuuuuuugaaauaaaauagccugucuuucagaucuaaaaaaaaaaaaaaaaaaaaaaaaaaaaaaaaaaaaaaaaaaaaaaaaaaaaaaaaaaaaaaaaugcaucccccccccccccccccccccccccccccccaaaggcucuuuucagagccaccagaauu

SEQ ID NO: 8921 - RNA, 1323 nt, Artificial Sequence
  mRNA Design a-1 (A64-N5-C30-hSL-N5) comprising derived and/or modified sequence from Pf(3D7)__XP_001351122.1__HsALB_Pf-CSP(19-272)_L(AAY)_Pf-CSP(310-3 27)_Linker (AAY)_Pf-CSP(346-397) (opt4)
aggagagucccgcagucggcguccagcggcucugcuuguucgugugugugucguugcaggccuuauucaagcuuaccaugaagugggugaccuucaucagccugcuguuccuguucagcagcgccuacagccuguuccaggaguaccagugcuacggcagcagcagcaacaccagagugcugaacgagcugaacuacgacaacgccggcaccaaccuguacaacgagcuggagaugaacuacuacggcaagcaggagaacugguacagccugaagaagaacagcagaagccugggcgagaacgacgacggcaacaacgaggacaacgagaagcugagaaagcccaagcacaagaagcugaagcagcccgccgacggcaaccccgaccccaacgccaaccccaacguggaccccaacgccaaccccaacguggaccccaacgccaaccccaacguggaccccaacgccaaccccaacgccaaccccaacgccaaccccaacgccaaccccaacgccaaccccaacgccaaccccaacgccaaccccaacgccaaccccaacgccaaccccaacgccaaccccaacgccaaccccaacgccaaccccaacgccaaccccaacgccaaccccaacgccaaccccaacgccaaccccaacgccaaccccaacguggaccccaacgccaaccccaacgccaaccccaacgccaaccccaacgccaaccccaacgccaaccccaacgccaaccccaacgccaaccccaacgccaaccccaacgccaaccccaacgccaaccccaacgccaaccccaacgccaaccccaacgccaaccccaacgccaaccccaacgccaaccccaacgccaaccccaacgccaaccccaacgccaaccccgccgccuacgagcccagcgacaagcacaucaaggaguaccugaacaagauccagaacagccuggccgccuacaucaagcccggcagcgccaacaagcccaaggacgagcuggacuacgccaacgacaucgagaagaagaucugcaagauggagaagugcagcagcguguucaacguggugaacagcagcaucggccugaucauggugcugagcuuccuguuccugaacugaggacuagucccuguucccagagcccacuuuuuuuucuuuuuuugaaauaaaauagccugucuuucagaucuaaaaaaaaaaaaaaaaaaaaaaaaaaaaaaaaaaaaaaaaaaaaaaaaaaaaaaaaaaaaaaaaugcaucccccccccccccccccccccccccccccccaaaggcucuuuucagagccaccagaauu

SEQ ID NO: 8922 - RNA, 1923 nt, Artificial Sequence
  mRNA Design a-1 (A64-N5-C30-hSL-N5) comprising derived and/or modified sequence from Pf(3D7)__XP_001351122.1__LumSynt_L(GGS4-GGG)_Pf-CSP(19-397) (opt5)
aggagagucccgcagucggcguccagcggcucugcuuguucgugugugugucguugcaggccuuauucaagcuuaccaugcagaucuacgagggcaagcugaccgccgaagggcucagauucggaauuguggcuagccgguuuaaccacgcccuggucgaccgccuuguugagggcgcgaucgaugcuauugugagacaugggggacgggaagaggacaucacacuggugcgcguccccggcuccugggaaauuccuguggccgccggggagcucgcuagaaaagaggauaucgacgccguuaucgcuauuggagugcugauccggggcgccacgccgcacuucgauuauauugcgucugaagucagcaagggccuugccgaccugucccucgagcugcgcaaacccaucaccuuuggggugauuacagcugauacccuggaacaagccaucgagagagcuggaacaaagcauggcaauaaagggugggaggccgcgcucucugccauugaaauggcuaaccuguucaagagccuucggggaggcuccgggggaucuggcggcagcgggggauccggcgggggacuguuucaggaguaccagugcuauggcuccucuuccaauacccgcguucucaacgaacugaauuacgacaacgccgggacaaaucuuuauaacgagcuggaaaugaauuacuauggaaagcaggagaacugguacagccucaaaaagaacucuagaucccugggcgagaaugaugacggcaauaacgaagauaaugagaaacugcggaagccuaaacacaagaagcucaaacaacccgcugacgggaacccugaucccaacgccaauccuaacguggacccgaaugccaaccccaaugucgacccuaacgcuaaucccaacguggauccuaaugcgaaccccaaugccaacccgaaugcuaacccuaaugccaaccccaacgccaauccuaacgcuaaucccaacgccaaucccaacgcgaauccuaacgcuaauccgaacgccaaucccaacgccaauccuaacgcuaaucccaacgccaacccuaaugcuaaccccaaugccaacccgaaugcgaacccuaaugccaaccccaauguggacccuaacgcuaaucccaacgccaauccuaacgcuaaucccaacgccaacccgaaugcgaacccuaaugccaaccccaaugcuaaccccaaugccaacccuaaugcuaacccgaaugccaaccccaaugccaacccuaaugcuaaccccaaugcgaacccuaacgccaaucccaacgcuaauccuaacgccaaucccaacgccaauccgaacgcuaauccuaacaagaauaaccagggaaauggccaggggcauaacaugcccaaugauccuaaccgcaacgucgacgaaaaugccaacgcgaauagcgcuguuaaaaacaauaacaaugaggaacccucugauaagcacaucaaagaguaccugaacaagauccagaauagccuuagcaccgagugguccccguguucugugacgugcggaaacggcauucaagugagaaucaaaccugggagcgccaauaagcccaaggacgaacuggauuaugccaacgacauugagaaaaagaucuguaaaauggaaaagugcuccagcgucuucaaugugguuaacucuuccauuggccucaucauggugcugagcuuucuuuuccugaauugaggacuagucccuguucccagagcccacuuuuuuuucuuuuuuugaaauaaaauagccugucuuucagaucuaaaaaaaaaaaaaaaaaaaaaaaaaaaaaaaaaaaaaaaaaaaaaaaaaaaaaaaaaaaaaaaaugcaucccccccccccccccccccccccccccccccaaaggcucuuuucagagccaccagaauu

SEQ ID NO: 8923 - RNA, 1785 nt, Artificial Sequence
  mRNA Design a-1 (A64-N5-C30-hSL-N5) comprising derived and/or modified sequence from Pf(3D7)__XP_001351122.1__HsALB_Pf-CSP(19-272)_L(PVTN)_HBsAg (opt5)
aggagagucccgcagucggcguccagcggcucugcuuguucgugugugugucguugcaggccuuauucaagcuuaccaugaagugggugaccuucaucagccugcucuuucuguucuccucugccuacagccuuuuucaggaguaucaaugcuacggcuccucuagcaacacaagaguccugaaugaacucaacuaugacaaugcugggacgaaccuguacaaugagcuugaaaugaacuauuacggaaaacaggagaauugguauucccugaagaaaaacucucggagccucggcgaaaaugaugacgggaacaaugaggauaacgagaagcugcgcaaacccaagcacaagaaacugaagcagccugccgacggaaauccggaucccaacgcgaauccuaacguugaccccaacgcuaauccuaacguggaucccaaugccaacccuaauguggacccgaacgccaaucccaacgcuaauccuaacgccaaucccaacgcuaauccuaacgccaaucccaacgcgaacccgaaugccaacccuaaugcuaaccccaaugccaacccuaaugcuaaccccaaugccaaccccaaugcgaacccuaaugccaacccgaaugcuaaccccaacgccaauccuaacgcuaaucccaacgccaauccuaacgucgaucccaaugccaacccgaaugcuaacccuaaugcgaaccccaaugccaacccuaaugcuaaccccaacgccaauccuaacgccaaucccaacgcuaauccgaacgccaauccuaacgcgaaucccaacgcuaaucccaacgccaauccuaacgccaauccgaacgcuaaucccaacgccaacccuaaugcuaaccccaaugccaacccuaaugcgaaucccccugugaccaacauggaaaacauuacauccggcuuccucgggccccugcuuguucugcaggccggauuuuuccuccugaccagaauccuuacaauuccgcaaagccuggacucuugguggaccucccucaauuuucugggcggcagcccugugugucuggggcagaacucucagucccccacaagcaaucauucuccuaccuccugucccccgaucugcccuggauaccgguggaugugccuccgcagauucauuaucuuucuguucauccuucugcucugucugauuuuucuucugguccuccuggauuaccagggcaugcugcccgugugcccucucauccccgggagcacgaccacaaacaccggacccuguaaaacaugcaccacgccugcucaaggcaauuccauguucccgucuuguugcuguacaaagcccaccgacgggaacugcacaugcauuccuauccccagcuccugggccuuugcuaaauaucugugggagugggccagcguucgguucucuuggcuuucccugcucgugccuuucguccagugguuugugggacugagccccaccguguggcuuucugcgauuuggaugaugugguacuggggcccuagccuguauuccaucgucucuccguucauuccccuccugccuaucuuuuucugucuguggguuuacaucugaggacuagucccuguucccagagcccacuuuuuuuucuuuuuuugaaauaaaauagccugucuuucagaucuaaaaaaaaaaaaaaaaaaaaaaaaaaaaaaaaaaaaaaaaaaaaaaaaaaaaaaaaaaaaaaaaugcaucccccccccccccccccccccccccccccccaaaggcucuuuucagagccaccagaauu

SEQ ID NO: 8924 - RNA, 1902 nt, Artificial Sequence
  mRNA Design a-1 (A64-N5-C30-hSL-N5) comprising derived and/or modified sequence from Pf(3D7)__XP_001351122.1__HsALB_Pf-CSP(19-272)_L(AAY)_Pf-CSP(346-3 65)_L(AAY)_PADRE_L(PVTN)_HBsAg (opt5)
aggagagucccgcagucggcguccagcggcucugcuuguucgugugugugucguugcaggccuuauucaagcuuaccaugaagugggugaccuucaucagccugcucuuucuguucuccucugccuacagccuuuuucaggaguaucaaugcuacggcuccucuagcaacacaagaguccugaaugaacucaacuaugacaaugcugggacgaaccuguacaaugagcuugaaaugaacuauuacggaaaacaggagaauugguauucccugaagaaaaacucucggagccucggcgaaaaugaugacgggaacaaugaggauaacgagaagcugcgcaaacccaagcacaagaaacugaagcagccugccgacggaaauccggaucccaacgcgaauccuaacguugaccccaacgcuaauccuaacguggaucccaaugccaacccuaauguggacccgaacgccaaucccaacgcuaauccuaacgccaaucccaacgcuaauccuaacgccaaucccaacgcgaacccgaaugccaacccuaaugcuaaccccaaugccaacccuaaugcuaaccccaaugccaaccccaaugcgaacccuaaugccaacccgaaugcuaaccccaacgccaauccuaacgcuaaucccaacgccaauccuaacgucgaucccaaugccaacccgaaugcuaacccuaaugcgaaccccaaugccaacccuaaugcuaaccccaacgccaauccuaacgccaaucccaacgcuaauccgaacgccaauccuaacgcgaaucccaacgcuaaucccaacgccaauccuaacgccaauccgaacgcuaaucccaacgccaacccuaaugcuaaccccaaugccaacccuaaugcgaaccccgccgcuuacauuaaaccuggcuccgccaauaagcccaaagacgaacucgauuacgcuaacgacaucgaggccgcguaugccaaguucguggcugccuggacccugaaggcugccgccccgguuacaaauauggaaaacauuaccagcggguuucuuggaccucugcucgugcugcaggcuggcuucuuucuucugacaagaauccucaccauuccccaaucucuggauuccugguggacaagccugaauuuccucggcgggucuccugucugucugggacagaacucccagagccccaccucuaaucauuccccgacgagcugcccucccaucuguccuggcuaccgguggaugugccuucgcagauuuaucauuuuccuguuuauccuccugcuuugucugauuuuccuccuggugcugcucgacuaucaggggaugcugcccguuugcccccuuaucccuggauccaccacaaccaacacaggcccguguaaaaccugcacgacacccgcgcaaggaaauucuauguuuccuagcuguugcuguaccaagcccacagacgggaacuguaccugcauuccuauccccuccagcugggccuucgcuaaauaccugugggagugggccucugugcgguucuccuggcucagccugcuugucccuuuugugcagugguucgugggccugucuccgaccgucuggcucagcgccauuuggaugaugugguauuggggccccucccuguacucuaucguuagcccuuuuaucccccugcucccuauuuucuuuugccuguggguguauaucugaggacuagucccuguucccagagcccacuuuuuuuucuuuuuuugaaauaaaauagccugucuuucagaucuaaaaaaaaaaaaaaaaaaaaaaaaaaaaaaaaaaaaaaaaaaaaaaaaaaaaaaaaaaaaaaaaugcaucccccccccccccccccccccccccccccccaaaggcucuuuucagagccaccagaauu

SEQ ID NO: 8925 - RNA, 2121 nt, Artificial Sequence
  mRNA Design a-1 (A64-N5-C30-hSL-N5) comprising derived and/or modified sequence from Pf(3D7)__XP_001351122.1__HsALB_Pf-CSP(19-384)_L(PVTN)_HBsAg (opt5)
aggagagucccgcagucggcguccagcggcucugcuuguucgugugugugucguugcaggccuuauucaagcuuaccaugaagugggugaccuucaucagccugcucuuucuguucuccucugccuacagccuuuuucaggaguaucaaugcuacggcuccucuagcaacacaagaguccugaaugaacucaacuaugacaaugcugggacgaaccuguacaaugagcuugaaaugaacuauuacggaaaacaggagaauugguauucccugaagaaaaacucucggagccucggcgaaaaugaugacgggaacaaugaggauaacgagaagcugcgcaaacccaagcacaagaaacugaagcagccugccgacggaaauccggaucccaacgcgaauccuaacguugaccccaacgcuaauccuaacguggaucccaaugccaacccuaauguggacccgaacgccaaucccaacgcuaauccuaacgccaaucccaacgcuaauccuaacgccaaucccaacgcgaacccgaaugccaacccuaaugcuaaccccaaugccaacccuaaugcuaaccccaaugccaaccccaaugcgaacccuaaugccaacccgaaugcuaaccccaacgccaauccuaacgcuaaucccaacgccaauccuaacgucgaucccaaugccaacccgaaugcuaacccuaaugcgaaccccaaugccaacccuaaugcuaaccccaacgccaauccuaacgccaaucccaacgcuaauccgaacgccaauccuaacgcgaaucccaacgcuaaucccaacgccaauccuaacgccaauccgaacgcuaaucccaacgccaacccuaaugcuaaccccaaugccaacccuaaugcgaaccccaauaaaaacaaucagggcaacgggcaaggacauaauaugccuaacgaccccaauagaaacguggaugaaaaugccaacgcuaacuccgccguuaagaauaacaauaacgaggaaccgagcgacaaacacauuaaggaguaccucaauaagauccagaacucucuguccaccgaguggagcccuuguucugugacaugcggcaauggcauucagguccggaucaaacccggguccgcuaacaagccuaaagaugaacuugacuacgccaaugacauugagaagaaaaucuguaagauggaaaaaugcagcucuguguucaacguugucaauuccagccccgugaccaacauggagaauaucacauccggauuucugggcccgcuccuggugcuucaggcgggguucuuucugcucacccgcauucugacaaucccucaaucucuggauagcugguggaccucccucaacuuccugggaggcagccccgugugucuugggcaaaauucucaguccccuacgagcaaccauucucccaccagcugucccccuauuugcccgggauauagauggaugugccugcggcgcuuuaucauuuuccucuuuauccugcuucugugucucauuuuccugcugguccuccuggacuaccagggcaugcuucccguuugcccucugauccccggcuccacaaccacaaacaccgggccuuguaagacgugcacaacccccgcccagggaaauucuauguuuccuagcugcuguugcacaaagccgaccgauggcaacuguaccugcauccccauuccuuccagcugggcuuucgccaaauaucucugggaaugggcuucugugagauucuccuggcugagccuucuggugcccuuuguccagugguucguggggcucucuccuacaguuuggcuguccgccaucuggaugaugugguacuggggacccagccuguauuccauugugucuccguuuaucccucuccugcccauuuucuuuugucuuugggucuacaucugaggacuagucccuguucccagagcccacuuuuuuuucuuuuuuugaaauaaaauagccugucuuucagaucuaaaaaaaaaaaaaaaaaaaaaaaaaaaaaaaaaaaaaaaaaaaaaaaaaaaaaaaaaaaaaaaaugcaucccccccccccccccccccccccccccccccaaaggcucuuuucagagccaccagaauu

SEQ ID NO: 8926 - RNA, 1938 nt, Artificial Sequence
  mRNA Design a-1 (A64-N5-C30-hSL-N5) comprising derived and/or modified sequence from Pf(3D7)__XP_001351122.1__HsALB_Pf-CSP(19-384)_L(SGG)_Ferritin (opt5)
aggagagucccgcagucggcguccagcggcucugcuuguucgugugugugucguugcaggccuuauucaagcuuaccaugaagugggugaccuucaucagccugcucuuucuguucuccucugccuacagccuuuuucaggaguaucaaugcuacggcuccucuagcaacacaagagugcugaaugaacucaacuaugacaaugcugggacgaaccuguacaaugagcuugaaaugaacuauuacggaaaacaggagaauugguauucccugaagaaaaacucucggagccucggcgaaaaugaugacgggaacaaugaggauaacgagaagcugcgcaaacccaagcacaagaaacugaagcagccugccgacggaaauccggaucccaacgcgaauccuaacguugaccccaacgcuaauccuaacguggaucccaaugccaacccuaauguggacccgaacgccaaucccaacgcuaauccuaacgccaaucccaacgcuaauccuaacgccaaucccaacgcgaacccgaaugccaacccuaaugcuaaccccaaugccaacccuaaugcuaaccccaaugccaaccccaaugcgaacccuaaugccaacccgaaugcuaaccccaacgccaauccuaacgcuaaucccaacgccaauccuaacgucgaucccaaugccaacccgaaugcuaacccuaaugcgaaccccaaugccaacccuaaugcuaaccccaacgccaauccuaacgccaaucccaacgcuaauccgaacgccaauccuaacgcgaaucccaacgcuaaucccaacgccaauccuaacgccaauccgaacgcuaaucccaacgccaacccuaaugcuaaccccaaugccaacccuaaugcgaaccccaauaaaaacaaucagggcaacgggcaaggacauaauaugccuaacgaccccaauagaaacguggaugaaaaugccaacgcuaacuccgccguuaagaauaacaauaacgaggaaccgagcgacaaacacauuaaggaguaccucaauaagauccagaacucucuguccaccgaguggagcccuuguucugugacaugcggcaauggcauucagguccggaucaaacccggguccgcuaacaagccuaaagaugaacuugacuacgccaaugacauugagaagaaaaucuguaagauggaaaaaugcagcucuguguucaacguugugaacuccagcuccggaggccugucuaaggauaucauuaagcuccugaaugagcaggucaauaaagaaaugaacagcuccaaucuuuauaugagcaugucuuccugguguuacacccauagccuggacggggcgggacucuuucuguucgaucacgccgcugaggaguaugaacaugccaagaaacugaucauuuuucucaacgagaacaaugugcccgugcaacugacaucuaucagcgcuccggaacacaaguucgagggccuuacccagauuuuucagaaagccuacgaacacgagcagcauaucuccgagucuauuaacaauaucgucgaccacgccaucaagagcaaggaucaugcuacauucaacuuucugcaaugguauguugcggaacagcacgaggaagagguccucuucaaagacauucuggauaagaucgaacuuauugggaaugagaaccacggacuguaccucgccgaccaguaugugaaaggcaucgcuaagucccgcaaaagcugaggacuagucccuguucccagagcccacuuuuuuuucuuuuuuugaaauaaaauagccugucuuucagaucuaaaaaaaaaaaaaaaaaaaaaaaaaaaaaaaaaaaaaaaaaaaaaaaaaaaaaaaaaaaaaaaaugcaucccccccccccccccccccccccccccccccaaaggcucuuuucagagccaccagaauu

SEQ ID NO: 8927 - RNA, 1899 nt, Artificial Sequence
  mRNA Design a-1 (A64-N5-C30-hSL-N5) comprising derived and/or modified sequence from Pf(3D7)__XP_001351122.1__HsALB_Pf-CSP(93-384)_L(PVTN)_HBsAg (opt5)
aggagagucccgcagucggcguccagcggcucugcuuguucgugugugugucguugcaggccuuauucaagcuuaccaugaagugggugaccuucaucagccugcucuuucuguucuccucugccuacagcaaacuuaagcagcccgcugacggcaacccugauccgaaugccaaccccaaugucgacccuaacgcgaaucccaacguugauccuaaugcuaaccccaauguggacccuaacgccaauccgaacgccaaucccaacgcuaauccuaacgccaaccccaaugcuaacccuaaugccaaccccaaugcgaacccgaaugccaacccuaaugcuaaccccaaugccaacccuaaugcuaaccccaaugccaaccccaacgcgaauccuaacgccaauccgaacgcuaaucccaacgccaauccuaacgcuaaucccaacguggauccuaaugccaaccccaaugccaacccgaaugcuaacccuaacgcgaaucccaacgccaauccuaacgcuaaucccaacgccaauccuaacgccaaucccaacgcuaauccgaacgccaauccuaacgcgaaucccaacgcuaaccccaaugccaacccuaaugccaacccgaaugcuaaccccaaugccaacccuaaugcuaaccccaaugccaacccuaauaaaaacaaucaagggaacggacagggccacaauaugcccaacgacccuaacagaaaugucgaugagaacgcgaaugccaacuccgcugugaagaauaacaauaacgaggaacccucugacaaacauauuaaggaauaucugaauaagauccagaacagccucuccacagaguggucuccgugcagcguuacgugugggaaugggauucaggugcggaucaaaccuggcuccgccaacaagcccaaagaugaacuggacuacgcuaaugauauugagaagaaaaucugcaagauggagaaguguagcucugucuuuaacgugguuaauuccagcccugugaccaacauggaaaacaucacaucuggguuccuuggaccccugcucguccugcaagccggcuuuuuccugcucacccgcauucugacaaucccgcagucccuugacagcugguggaccucucugaauuuucucggcggguccccugugugccugggacagaacagccagucccccacaucuaaucacagcccuaccuccuguccucccauuugccccggcuauagauggaugugucuucggcgcuucaucauuuuucuguucauccuccugcugugccucauuuuucugcuugugcugcucgauuaccaagggaugcugccggucuguccccuuaucccuggaagcacgaccacaaacaccggccccugcaaaacauguaccacgccugcgcagggaaauucuauguuccccuccugcugcuguacaaagccuaccgacggaaacugcacauguaucccgauucccagcucuugggccuuugcuaaauaucugugggagugggccagcguuagauucuccuggcucucucugcuggugccuuucgugcagugguuugucggccucagccccaccguguggcuguccgcuaucuggaugaugugguacuggggcccuagccuuuauucuauuguuucccccuucaucccgcugcucccuaucuuuuucugccuguggguguacauuugaggacuagucccuguucccagagcccacuuuuuuuucuuuuuuugaaauaaaauagccugucuuucagaucuaaaaaaaaaaaaaaaaaaaaaaaaaaaaaaaaaaaaaaaaaaaaaaaaaaaaaaaaaaaaaaaaugcaucccccccccccccccccccccccccccccccaaaggcucuuuucagagccaccagaauu

SEQ ID NO: 8928 - RNA, 1560 nt, Artificial Sequence; identical to SEQ ID NO: 834
  mRNA Design a-1 (A64-N5-C30-hSL-N5) comprising derived and/or modified sequence from Pf(3D7)__XP_001351122.1__HsALB_Pf-CSP(199-377)_L(PVTN)_HBsAg (opt5)

SEQ ID NO: 8929 - RNA, 1257 nt, Artificial Sequence
  mRNA Design a-1 (A64-N5-C30-hSL-N5) comprising derived and/or modified sequence from Pf(3D7)__XP_001351122.1__HsALB_Pf-CSP(19-272)_L(AAY)_Pf-CSP(346-3 75)_L(AAY)_Pf-CSP(310-327) (opt5)
aggagagucccgcagucggcguccagcggcucugcuuguucgugugugugucguugcaggccuuauucaagcuuaccaugaagugggugaccuucaucagccugcucuuucuguucuccucugccuacagccuuuuucaggaguaucaaugcuacggcuccucuagcaacacaagaguccugaaugaacucaacuaugacaaugcugggacgaaccuguacaaugagcuugaaaugaacuauuacggaaaacaggagaauugguauucccugaagaaaaacucucggagccucggcgaaaaugaugacgggaacaaugaggauaacgagaagcugcgcaaacccaagcacaagaaacugaagcagccugccgacggaaauccggaucccaacgcgaauccuaacguugaccccaacgcuaauccuaacguggaucccaaugccaacccuaauguggacccgaacgccaaucccaacgcuaauccuaacgccaaucccaacgcuaauccuaacgccaaucccaacgcgaacccgaaugccaacccuaaugcuaaccccaaugccaacccuaaugcuaaccccaaugccaaccccaaugcgaacccuaaugccaacccgaaugcuaaccccaacgccaauccuaacgcuaaucccaacgccaauccuaacgucgaucccaaugccaacccgaaugcuaacccuaaugcgaaccccaaugccaacccuaaugcuaaccccaacgccaauccuaacgccaaucccaacgcuaauccgaacgccaauccuaacgcgaaucccaacgcuaaucccaacgccaauccuaacgccaauccgaacgcuaaucccaacgccaacccuaaugcuaaccccaaugccaacccuaaugcgaaccccgccgcuuacauuaaaccuggcuccgccaauaagcccaaagacgaacucgauuacgcuaacgacaucgagaagaagauuuguaaaauggaaaagugcagcgccgcguaugagccgucugauaaacauaucaaggaguaccugaauaaaauucagaacucccuuugaggacuagucccuguucccagagcccacuuuuuuuucuuuuuuugaaauaaaauagccugucuuucagaucuaaaaaaaaaaaaaaaaaaaaaaaaaaaaaaaaaaaaaaaaaaaaaaaaaaaaaaaaaaaaaaaaugcaucccccccccccccccccccccccccccccccaaaggcucuuuucagagccaccagaauu

SEQ ID NO: 8930 - RNA, 1305 nt, Artificial Sequence
  mRNA Design a-1 (A64-N5-C30-hSL-N5) comprising derived and/or modified sequence from Pf(3D7)__XP_001351122.1__HsALB_Pf-CSP(19-272)_L(AAY)_Pf-CSP(346-3 75)_L(AAY)_Pf-CSP(310-327)_L(AAY)_PADRE (opt5)
aggagagucccgcagucggcguccagcggcucugcuuguucgugugugugucguugcaggccuuauucaagcuuaccaugaagugggugaccuucaucagccugcucuuucuguucuccucugccuacagccuuuuucaggaguaucaaugcuacggcuccucuagcaacacaagaguccugaaugaacucaacuaugacaaugcugggacgaaccuguacaaugagcuugaaaugaacuauuacggaaaacaggagaauugguauucccugaagaaaaacucucggagccucggcgaaaaugaugacgggaacaaugaggauaacgagaagcugcgcaaacccaagcacaagaaacugaagcagccugccgacggaaauccggaucccaacgcgaauccuaacguugaccccaacgcuaauccuaacguggaucccaaugccaacccuaauguggacccgaacgccaaucccaacgcuaauccuaacgccaaucccaacgcuaauccuaacgccaaucccaacgcgaacccgaaugccaacccuaaugcuaaccccaaugccaacccuaaugcuaaccccaaugccaaccccaaugcgaacccuaaugccaacccgaaugcuaaccccaacgccaauccuaacgcuaaucccaacgccaauccuaacgucgaucccaaugccaacccgaaugcuaacccuaaugcgaaccccaaugccaacccuaaugcuaaccccaacgccaauccuaacgccaaucccaacgcuaauccgaacgccaauccuaacgcgaaucccaacgcuaaucccaacgccaauccuaacgccaauccgaacgcuaaucccaacgccaacccuaaugcuaaccccaaugccaacccuaaugcgaaccccgccgcuuacauuaaaccuggcuccgccaauaagcccaaagacgaacucgauuacgcuaacgacaucgagaagaagauuuguaaaauggaaaagugcagcgccgcguaugagccgucugauaaacauaucaaggaguaccugaauaaaauucagaacucccuugccgcuuaugccaaguucguggcugccuggacccugaaagccgcugcgugaggacuagucccuguucccagagcccacuuuuuuuucuuuuuuugaaauaaaauagccugucuuucagaucuaaaaaaaaaaaaaaaaaaaaaaaaaaaaaaaaaaaaaaaaaaaaaaaaaaaaaaaaaaaaaaaaugcaucccccccccccccccccccccccccccccccaaaggcucuuuucagagccaccagaauu

SEQ ID NO: 8931 - RNA, 1305 nt, Artificial Sequence
  mRNA Design a-1 (A64-N5-C30-hSL-N5) comprising derived and/or modified sequence from Pf(3D7)__XP_001351122.1__HsALB_Pf-CSP(19-272)_L(AAY)_Pf-CSP(310-3 27)_L(AAY)_Pf-CSP(346-375)_L(AAY)_PADRE (opt5)
aggagagucccgcagucggcguccagcggcucugcuuguucgugugugugucguugcaggccuuauucaagcuuaccaugaagugggugaccuucaucagccugcucuuucuguucuccucugccuacagccuuuuucaggaguaucaaugcuacggcuccucuagcaacacaagaguccugaaugaacucaacuaugacaaugcugggacgaaccuguacaaugagcuugaaaugaacuauuacggaaaacaggagaauugguauucccugaagaaaaacucucggagccucggcgaaaaugaugacgggaacaaugaggauaacgagaagcugcgcaaacccaagcacaagaaacugaagcagccugccgacggaaauccggaucccaacgcgaauccuaacguugaccccaacgcuaauccuaacguggaucccaaugccaacccuaauguggacccgaacgccaaucccaacgcuaauccuaacgccaaucccaacgcuaauccuaacgccaaucccaacgcgaacccgaaugccaacccuaaugcuaaccccaaugccaacccuaaugcuaaccccaaugccaaccccaaugcgaacccuaaugccaacccgaaugcuaaccccaacgccaauccuaacgcuaaucccaacgccaauccuaacgucgaucccaaugccaacccgaaugcuaacccuaaugcgaaccccaaugccaacccuaaugcuaaccccaacgccaauccuaacgccaaucccaacgcuaauccgaacgccaauccuaacgcgaaucccaacgcuaaucccaacgccaauccuaacgccaauccgaacgcuaaucccaacgccaacccuaaugcuaaccccaaugccaacccuaaugcgaaccccgccgcuuacgaaccuuccgacaaacauauuaaggaguaccucaauaaaauccagaacagccuggccgcuuauauuaagcccggcucugccaauaagccgaaagaugaacuugacuacgcgaacgauaucgagaagaaaauuuguaagauggagaaaugcuccgccgcuuaugccaaguucguggcugccuggacccugaaagccgcugcgugaggacuagucccuguucccagagcccacuuuuuuuucuuuuuuugaaauaaaauagccugucuuucagaucuaaaaaaaaaaaaaaaaaaaaaaaaaaaaaaaaaaaaaaaaaaaaaaaaaaaaaaaaaaaaaaaaugcaucccccccccccccccccccccccccccccccaaaggcucuuuucagagccaccagaauu

SEQ ID NO: 8932 - RNA, 1359 nt, Artificial Sequence
  mRNA Design a-1 (A64-N5-C30-hSL-N5) comprising derived and/or modified sequence from Pf(3D7)__XP_001351122.1__HsALB_Pf-CSP(19-272)_L(AAY)_Pf-CSP(310-3 27)_L(AAY)_Pf-CSP(346-375)_L(AAY)_PADRE_L(AAY)_P2 (opt5)
aggagagucccgcagucggcguccagcggcucugcuuguucgugugugugucguugcaggccuuauucaagcuuaccaugaagugggugaccuucaucagccugcucuuucuguucuccucugccuacagccuuuuucaggaguaucaaugcuacggcuccucuagcaacacaagaguccugaaugaacucaacuaugacaaugcugggacgaaccuguacaaugagcuugaaaugaacuauuacggaaaacaggagaauugguauucccugaagaaaaacucucggagccucggcgaaaaugaugacgggaacaaugaggauaacgagaagcugcgcaaacccaagcacaagaaacugaagcagccugccgacggaaauccggaucccaacgcgaauccuaacguugaccccaacgcuaauccuaacguggaucccaaugccaacccuaauguggacccgaacgccaaucccaacgcuaauccuaacgccaaucccaacgcuaauccuaacgccaaucccaacgcgaacccgaaugccaacccuaaugcuaaccccaaugccaacccuaaugcuaaccccaaugccaaccccaaugcgaacccuaaugccaacccgaaugcuaaccccaacgccaauccuaacgcuaaucccaacgccaauccuaacgucgaucccaaugccaacccgaaugcuaacccuaaugcgaaccccaaugccaacccuaaugcuaaccccaacgccaauccuaacgccaaucccaacgcuaauccgaacgccaauccuaacgcgaaucccaacgcuaaucccaacgccaauccuaacgccaauccgaacgcuaaucccaacgccaacccuaaugcuaaccccaaugccaacccuaaugcgaaccccgccgcuuacgaaccuuccgacaaacauauuaaggaguaccucaauaaaauccagaacagccuggccgcuuauauuaagcccggcucugccaauaagccgaaagaugaacuugacuacgcgaacgauaucgagaagaaaauuuguaagauggagaaaugcuccgccgcuuaugccaaguucguggcugccuggacccugaaagccgcugcggccgcuuaccaauauaucaaggccaauagcaaguuuaucgggauuacagaacucugaggacuagucccuguucccagagcccacuuuuuuuucuuuuuuugaaauaaaauagccugucuuucagaucuaaaaaaaaaaaaaaaaaaaaaaaaaaaaaaaaaaaaaaaaaaaaaaaaaaaaaaaaaaaaaaaaugcaucccccccccccccccccccccccccccccccaaaggcucuuuucagagccaccagaauu

SEQ ID NO: 8933 - RNA, 1323 nt, Artificial Sequence
  mRNA Design a-1 (A64-N5-C30-hSL-N5) comprising derived and/or modified sequence from Pf(3D7)__XP_001351122.1__HsALB_Pf-CSP(19-272)_L(AAY)_Pf-CSP(310-3 27)_Linker (AAY)_Pf-CSP(346-397) (opt5)
aggagagucccgcagucggcguccagcggcucugcuuguucgugugugugucguugcaggccuuauucaagcuuaccaugaagugggugaccuucaucagccugcucuuucuguucuccucugccuacagccuuuuucaggaguaucaaugcuacggcuccucuagcaacacaagaguccugaaugaacucaacuaugacaaugcugggacgaaccuguacaaugagcuugaaaugaacuauuacggaaaacaggagaauugguauucccugaagaaaaacucucggagccucggcgaaaaugaugacgggaacaaugaggauaacgagaagcugcgcaaacccaagcacaagaaacugaagcagccugccgacggaaauccggaucccaacgcgaauccuaacguugaccccaacgcuaauccuaacguggaucccaaugccaacccuaauguggacccgaacgccaaucccaacgcuaauccuaacgccaaucccaacgcuaauccuaacgccaaucccaacgcgaacccgaaugccaacccuaaugcuaaccccaaugccaacccuaaugcuaaccccaaugccaaccccaaugcgaacccuaaugccaacccgaaugcuaaccccaacgccaauccuaacgcuaaucccaacgccaauccuaacgucgaucccaaugccaacccgaaugcuaacccuaaugcgaaccccaaugccaacccuaaugcuaaccccaacgccaauccuaacgccaaucccaacgcuaauccgaacgccaauccuaacgcgaaucccaacgcuaaucccaacgccaauccuaacgccaauccgaacgcuaaucccaacgccaacccuaaugcuaaccccaaugccaacccuaaugcgaaccccgccgcuuacgaaccuuccgacaaacauauuaaggaguaccucaauaaaauccagaacagccuggccgcuuauauuaagcccggcucugccaauaagccgaaagaugaacuugacuacgcgaacgauaucgagaagaaaauuuguaagauggagaaaugcuccagcguguucaauguugugaacucuuccaucgggcugaucaugguccucagcuuucuguuccuuaauugaggacuagucccuguucccagagcccacuuuuuuuucuuuuuuugaaauaaaauagccugucuuucagaucuaaaaaaaaaaaaaaaaaaaaaaaaaaaaaaaaaaaaaaaaaaaaaaaaaaaaaaaaaaaaaaaaugcaucccccccccccccccccccccccccccccccaaaggcucuuuucagagccaccagaauu

SEQ ID NO: 8934 - RNA, 1923 nt, Artificial Sequence
  mRNA Design a-1 (A64-N5-C30-hSL-N5) comprising derived and/or modified sequence from Pf(3D7)__XP_001351122.1__LumSynt_L(GGS4-GGG)_Pf-CSP(19-397) (opt6)
aggagagucccgcagucggcguccagcggcucugcuuguucgugugugugucguugcaggccuuauucaagcuuaccaugcaaauauacgaaggaaaacuaacagcagaaggauuacgauucggcauaguagcaucaagguucaaccacgcauuaguagauagacuaguagaaggagcaauagacgcaauaguccgacauggaggacgagaagaagauauaacacuagucagaguaccagggagcugggaaaucccaguagcagcaggagaacucgcaagaaaagaagauaucgacgccguaaucgcaaucgggguacuaauaagaggcgcaacaccccauuucgacuacauagcaagcgaaguaucaaaaggauuagcagaccuaaguuuagaacuaagaaaaccuauuacauucggcgucauaacggcagacacauuagaacaagccaucgaaagagcaggaacaaaacacggaaacaaaggcugggaagcagcacuaagcgcaauugaaauggcaaauuuauucaaaucccuaagaggcggcucagguggcaguggaggaucaggaggaucaggaggaggccuauuccaagaauaucaaugcuacggaucgagcucgaauacacgcguauuaaacgaauuaaacuacgacaacgcaggaacaaaccuauacaacgaacuagaaaugaacuauuauggaaaacaagagaacugguacucccuaaaaaaaaacagucgaagcuuaggagaaaaugacgacggaaauaacgaagacaacgaaaaacuaagaaaacccaaacauaaaaaauuaaaacaacccgcugacggaaacccagacccaaacgcuaacccgaacguugauccaaaugcaaacccaaauguggauccaaaugcaaaccccaacguagauccaaaugcaaacccaaacgcaaaccccaaugccaacccaaacgccaacccuaaugcuaauccaaacgcaaacccaaacgcaaacccgaacgcaaauccaaacgcaaacccuaaugcuaacccaaaugcaaauccaaacgcaaacccaaacgcuaacccaaacgcaaacccaaaugcaaacccaaaugcaaacccaaacgcaaauccaaacguagacccaaacgcaaauccaaacgcaaauccaaacgcaaacccaaacgccaaccccaaugcaaauccgaacgcaaacccaaacgcaaacccaaacgcaaacccaaacgcaaacccaaaugccaacccaaacgcaaacccgaacgcaaacccaaacgcaaacccaaacgcaaacccuaaugcgaacccaaaugccaacccaaacgcaaaccccaacgcuaacccaaacaaaaacaaucaaggaaacggacaagggcacaacaugccaaacgauccaaacagaaaugucgacgaaaacgccaaugcaaacagugccguaaaaaauaauaacaacgaagaaccuucagacaaacacauaaaagaauacuuaaacaaaauacaaaacucauuaucaaccgaauggagcccauguucuguuacaugcggaaauggaauacaaguaagaauaaaaccaggaucagcaaacaaaccaaaagacgaauuagacuacgcaaaugauauagaaaaaaaaauaugcaagauggaaaaaugcaguucuguauuuaacguaguaaacagcucaauaggucuaauaaugguacuauccuuucuuuuccugaacuaaggacuagucccuguucccagagcccacuuuuuuuucuuuuuuugaaauaaaauagccugucuuucagaucuaaaaaaaaaaaaaaaaaaaaaaaaaaaaaaaaaaaaaaaaaaaaaaaaaaaaaaaaaaaaaaaaugcaucccccccccccccccccccccccccccccccaaaggcucuuuucagagccaccagaauu

SEQ ID NO: 8935 - RNA, 1785 nt, Artificial Sequence
  mRNA Design a-1 (A64-N5-C30-hSL-N5) comprising derived and/or modified sequence from Pf(3D7)__XP_001351122.1__HsALB_Pf-CSP(19-272)_L(PVTN)_HBsAg (opt6)
aggagagucccgcagucggcguccagcggcucugcuuguucgugugugugucguugcaggccuuauucaagcuuaccaugaaauggguaaccuucaucucacuauuauucuuauuuucaucugcauacucacucuuccaagaauaccaaugcuacgguucaucuucuaacacaagaguacuaaacgaacuaaacuacgacaacgcaggaacaaaccucuauaacgaacuugaaaugaacuacuauggaaaacaagaaaacugguauucccuaaaaaaaaacucaagauccuuaggagaaaacgacgacggaaauaacgaagacaacgaaaaacuaagaaaaccaaaacacaaaaaacuaaaacaacccgcagacggaaacccagacccaaacgcaaacccaaacguagacccaaacgcaaacccaaacgucgacccaaacgccaauccaaacguagacccaaacgcuaacccaaacgccaauccaaacgcaaauccaaaugccaacccaaacgcaaacccaaaugcgaauccaaaugcaaaccccaaugcaaacccaaacgcaaauccaaacgcaaacccaaacgcaaacccuaacgcaaauccaaaugcaaacccuaacgcaaacccaaacgcaaauccaaacgcaaacccaaaugcaaauccaaacgucgacccaaacgcaaacccgaacgcaaacccaaacgcaaacccaaaugcaaauccaaaugcaaaccccaaugcaaacccaaacgcaaacccaaacgcuaacccaaaugcaaacccaaacgcaaacccaaacgcaaauccaaacgcaaacccaaacgcaaacccaaaugcaaacccaaacgcaaaccccaaugcaaauccaaacgcaaacccaaacgcaaacccacccguaaccaacauggaaaacaucacaucaggauuccuuggaccccucuuaguacuucaagcaggauucuuccuauuaacaagaauacuaacaauaccucaaucuuuagauucaugguggacuucauuaaauuuccuaggaggaagcccaguaugcuuaggacaaaacagccaaucaccaaccucaaaccacucaccaaccucaugcccaccaauaugcccaggauaccgauggaugugccuaagaagauucauaauauucuuauucauacuacuacuaugccucauauucuuacuaguacuauuagacuaccaaggaaugcugccagucugcccacuuauaccagguagcaccaccacuaacacaggaccuugcaaaacaugcacaacacccgcucaaggaaauucuauguuuccaucaugcugcugcacuaaacccacagauggcaauuguacaugcauaccaauccccucaucaugggcauuugccaaauacuuaugggaaugggcaucuguaagauucucuuggcuaucacucuuaguaccauucguacaaugguucguaggccuauccccuacaguauggcuauccgcaauauggaugaugugguacuggggaccaucacuauacucaauagucucacccuucauaccacuauuaccaauauucuucugccuauggguauauauauaaggacuagucccuguucccagagcccacuuuuuuuucuuuuuuugaaauaaaauagccugucuuucagaucuaaaaaaaaaaaaaaaaaaaaaaaaaaaaaaaaaaaaaaaaaaaaaaaaaaaaaaaaaaaaaaaaugcaucccccccccccccccccccccccccccccccaaaggcucuuuucagagccaccagaauu

SEQ ID NO: 8936 - RNA, 1902 nt, Artificial Sequence
  mRNA Design a-1 (A64-N5-C30-hSL-N5) comprising derived and/or modified sequence from Pf(3D7)__XP_001351122.1__HsALB_Pf-CSP(19-272)_L(AAY)_Pf-CSP(346-3 65)_L(AAY)_PADRE_L(PVTN)_HBsAg (opt6)
aggagagucccgcagucggcguccagcggcucugcuuguucgugugugugucguugcaggccuuauucaagcuuaccaugaaaugggucaccuucauuuccuuauuauucuuauuuucguccgcauacucacuauuucaagaauaucaauguuacggaucaagcucaaacacccgcguacucaacgaacuaaacuacgacaacgcaggaacaaaccuauauaacgaacuagaaaugaauuauuacggaaaacaagaaaacugguauucacuuaaaaaaaacuccagaucccuuggcgaaaacgacgacggaaauaaugaagacaacgaaaaacuuagaaaaccaaaacauaaaaaacuaaaacaaccugcagacgguaacccagauccaaaugcuaacccaaauguagacccuaacgcuaacccaaacguagauccaaacgccaacccaaacguagauccaaacgcaaacccaaacgcaaauccaaaugcaaacccaaacgccaaccccaacgcaaacccaaaugcaaauccuaaugcaaaucccaacgcaaauccaaacgcaaauccaaaugcaaaccccaacgcaaacccaaaugcaaauccaaaugcaaauccaaaugcaaacccaaacgcaaacccaaaugcaaauccuaacgcaaacccaaacgucgaccccaacgcaaauccaaacgcaaacccaaacgcaaaccccaaugcaaacccaaaugcaaacccaaacgcaaacccaaacgcaaaccccaacgcaaauccaaacgcaaauccaaaugcaaauccaaacgcaaaccccaaugcaaaccccaaugcuaacccaaacgccaaucccaacgcaaacccaaacgcaaaucccaacgcaaauccaaacgcaaacccugcagcauacauaaaacccggcucugcuaauaaacccaaagaugaacucgacuaugccaacgacauagaagcagccuacgcaaaauucguagcugcauggacauuaaaagcagcagcaccagugacaaacauggaaaacauuacaucaggauucuuagguccauuauuaguccuccaagcaggauucuucuuacuaacuagaauauuaacaauaccacaaucccuagacucuugguggacuucacuaaauuuccuaggaggauccccaguaugucucggucaaaauucucaaucaccuacaucaaaccauucaccaacaagcugccccccaaucugucccggauacagauggaugugccuacgcagauucauuauauuucuauucauacuacuucuaugccuaauauuccuacuaguccuucuagacuaccaaggaaugcuacccguaugcccacuuauaccaggauccacaacaacaaacacagguccaugcaaaacaugcacaacaccagcccaagguaauucuauguucccaucaugcuguugcacaaaaccaacagacgguaacugcacaugcaucccaauacccucaucaugggcauucgcaaaauaccuaugggaaugggcuucaguaagauucuccugguuaucccuuuuagucccauucguacaaugguucguaggauuaucacccacuguauggcuaucagcaauauggaugaugugguauuggggcccaucucuuuacucaaucgucuccccuuuuauuccacuacuacccauauuuuucugccuauggguauacauuuaaggacuagucccuguucccagagcccacuuuuuuuucuuuuuuugaaauaaaauagccugucuuucagaucuaaaaaaaaaaaaaaaaaaaaaaaaaaaaaaaaaaaaaaaaaaaaaaaaaaaaaaaaaaaaaaaaugcaucccccccccccccccccccccccccccccccaaaggcucuuuucagagccaccagaauu

SEQ ID NO: 8937 - RNA, 2121 nt, Artificial Sequence
  mRNA Design a-1 (A64-N5-C30-hSL-N5) comprising derived and/or modified sequence from Pf(3D7)__XP_001351122.1__HsALB_Pf-CSP(19-384)_L(PVTN)_HBsAg (opt6)
aggagagucccgcagucggcguccagcggcucugcuuguucgugugugugucguugcaggccuuauucaagcuuaccaugaaauggguaaccuucauaucucucuuauuccuuuuuucaucugcauauucacuauuucaagaauaucaauguuauggaucaucaucaaacacccgaguacucaacgaauuaaauuacgacaacgcagguacuaacuuauacaacgaauuagaaaugaauuacuauggaaaacaagaaaacugguauucccucaaaaaaaacucucgaucucuaggcgaaaacgacgacggcaacaacgaagacaacgaaaaacuacguaaacccaaacacaaaaaacuaaaacaaccagcagauggaaacccagacccaaacgcaaacccaaacguagacccaaacgcaaauccaaacguagacccgaacgcaaauccaaauguagaucccaaugcuaauccaaaugccaacccaaacgcaaacccuaacgcuaaucccaacgcaaacccaaacgcaaacccaaaugcaaacccaaacgcaaaccccaacgcaaacccaaaugcaaauccaaaugcaaauccaaacgccaacccaaaugccaacccaaacgcaaauccaaacgcuaaccccaacgcaaaccccaacgccaaucccaacguagaccccaacgcaaacccaaaugcaaauccaaacgcaaaccccaaugcaaacccaaacgcuaacccuaaugcaaacccaaacgccaacccaaaugcaaaccccaacgccaacccaaacgcaaauccaaacgcaaacccaaacgcuaacccaaacgccaacccaaacgcaaacccaaacgcuaacccaaacgcaaacccaaaugcaaacccaaaugcuaauccaaauaaaaacaaccaaggaaacggccaaggacauaauaugccuaacgacccaaacagaaacguagacgaaaaugcaaacgcaaacuccgcaguaaaaaauaacaauaacgaagaacccuccgacaaacauauaaaagaauaucuaaacaaaauacaaaauucacucucuacugaaugguccccaugcucaguaacauguggaaacggaauccaaguacgcauaaaaccaggaucagcaaacaaaccaaaagacgaacuagacuacgcaaacgauauagaaaaaaaaauaugcaaaauggaaaaaugcuccuccguauucaacguagucaauucaucuccaguaaccaauauggaaaauauaaccuccggauuccuaggaccacuacucguuuuacaagcaggauucuucuuacuaacaagaauacucacuauaccacaaucccuggauucuugguggacaucccuaaauuucuuaggcggaucacccguaugccuaggccaaaauagccaaaguccaacuucaaaccacuccccaacuucuugcccaccaauaugccccggcuacagauggaugugccuucgacgauucauaauauuucuauucauacuauuacuaugucuaauauuccuacucguucuauuagacuaccaaggaauguuaccaguuugcccacuaauaccugguucaacaaccacuaacacuggucccugcaaaacauguaccaccccagcccaaggaaacucaauguuccccucaugcuguugcacaaaaccaaccgacggaaauugcacaugcauacccauaccaucuucuugggcauuugcuaaauaucuaugggaaugggcaucaguacgcuucucauggcuaucucuacuaguaccauucguccaaugguucguaggccuaucaccaacaguauggcuaucugcaauauggaugaugugguacuggggucccuccuuauauucaauuguaucaccuuuuaucccacuccuacccauauucuucuguuuauggguauacauauaaggacuagucccuguucccagagcccacuuuuuuuucuuuuuuugaaauaaaauagccugucuuucagaucuaaaaaaaaaaaaaaaaaaaaaaaaaaaaaaaaaaaaaaaaaaaaaaaaaaaaaaaaaaaaaaaaugcaucccccccccccccccccccccccccccccccaaaggcucuuuucagagccaccagaauu

SEQ ID NO: 8938 - RNA, 1938 nt, Artificial Sequence
  mRNA Design a-1 (A64-N5-C30-hSL-N5) comprising derived and/or modified sequence from Pf(3D7)__XP_001351122.1__HsALB_Pf-CSP(19-384)_L(SGG)_Ferritin (opt6)
aggagagucccgcagucggcguccagcggcucugcuuguucgugugugugucguugcaggccuuauucaagcuuaccaugaaauggguaacauuuauaucucuauuauucuuauucuccucagcauacucacucuuucaagaauaccaaugcuacgguucuucauccaacacacgaguccuaaacgaauuaaacuacgacaaugcaggaaccaaucuauacaaugaacuugaaaugaacuacuacggaaaacaagaaaacugguacucccuaaaaaaaaacucacgaagccuaggagaaaaugacgacggaaacaacgaagacaacgaaaaacuacgaaaacccaaacacaaaaaacuaaaacaacccgccgacggcaauccagauccaaacgcaaacccaaacguagaccccaacgccaacccaaacguagauccaaacgcaaauccaaauguugauccaaaugcaaaccccaacgcaaacccaaacgcaaacccaaacgcaaacccaaacgcaaacccaaacgcaaauccaaaugcaaaucccaacgcaaauccaaacgcaaauccaaaugcaaacccaaacgcuaaucccaacgcuaacccaaacgcaaacccaaacgcaaacccgaacgcuaacccaaacgcaaacccaaacgcaaaccccaacguagacccaaacgcaaacccaaacgcaaaccccaacgcaaacccaaacgcaaacccaaacgcaaaccccaacgcaaaccccaacgcaaacccaaacgccaaccccaaugcaaacccaaacgccaacccaaacgcaaacccaaacgcaaacccaaacgcaaacccaaacgcaaauccaaacgcaaacccaaacgcaaacccaaacgcaaacccaaaugcaaacccaaacaaaaacaaccaaggaaauggacaaggacacaacaugccaaacgacccaaaccguaacguagaugaaaaugccaacgcaaacucagccguaaaaaacaacaacaacgaagaaccuucagacaaacacauaaaagaauacuuaaacaaaauacaaaacucauuaucaacugaauggucccccuguucagucacaugcggaaauggaauacaaguaagaauuaaaccagguucagccaacaaaccaaaagacgaacuagacuacgcaaacgacauugaaaaaaaaauauguaaaauggaaaaauguaguucagucuucaacguaguaaacucaucauccggaggauuauccaaagacauaauaaaacucuuaaaugaacaaguaaacaaagaaaugaacucgagcaaccucuauaugucaaugucauccuggugcuacacccauucccuagacggcgccggacuauuccuguucgaccaugcagcagaagaauaugaacacgcaaaaaagcuaaucaucuucuuaaacgaaaacaaugucccaguacaacuaaccuccauaucagcaccugaacauaaauucgaaggacuaacacaaauauuucaaaaagcauacgaacacgaacaacacauaucagaaucaauuaauaacauaguagaccacgcaaucaaaagcaaggaccacgcaacauucaacuuucuacaaugguacguagcagaacaacaugaagaagaaguacucuucaaagacaucuuagacaaaauugaacucauaggaaacgaaaaucacggacucuaccucgcagaccaguacguaaaaggaaucgcaaaaucacguaaaagcuaaggacuagucccuguucccagagcccacuuuuuuuucuuuuuuugaaauaaaauagccugucuuucagaucuaaaaaaaaaaaaaaaaaaaaaaaaaaaaaaaaaaaaaaaaaaaaaaaaaaaaaaaaaaaaaaaaugcaucccccccccccccccccccccccccccccccaaaggcucuuuucagagccaccagaauu

SEQ ID NO: 8939 - RNA, 1899 nt, Artificial Sequence
  mRNA Design a-1 (A64-N5-C30-hSL-N5) comprising derived and/or modified sequence from Pf(3D7)__XP_001351122.1__HsALB_Pf-CSP(93-384)_L(PVTN)_HBsAg (opt6)
aggagagucccgcagucggcguccagcggcucugcuuguucgugugugugucguugcaggccuuauucaagcuuaccaugaaauggguaacuuuuauaucccuccuauuucuauuuucaucagccuauucaaaacuaaaacaacccgcagauggaaaucccgacccaaaugcaaauccaaauguagauccaaacgccaacccaaaugucgacccaaaugcaaacccaaacguagauccuaacgcaaacccaaaugcuaauccaaacgcuaacccaaacgcaaauccaaaugcuaacccaaacgcaaacccuaacgcaaacccaaacgcuaacccaaacgcaaacccaaacgccaacccaaacgcaaaccccaacgcaaacccuaacgcaaacccaaacgcaaacccaaaugccaacccaaacgcaaacccaaacgcaaacccaaacguagaccccaacgcuaauccaaaugcaaauccaaacgcaaacccaaaugccaacccaaacgccaacccuaaugcaaacccaaacgcaaacccaaaugcaaaccccaacgcaaauccaaacgcaaauccaaaugcaaacccaaacgcuaacccaaacgcaaaccccaaugcaaacccaaacgcaaauccaaaugcaaacccaaaugcaaauccaaaugcaaacccaaauaaaaacaaccaaggaaacggacaaggccauaacaugccaaacgacccaaaccgcaacgucgaugaaaacgccaacgcaaauucagcgguuaaaaacaacaacaaugaagaacccucagacaaacacauaaaagaauacuuaaacaaaauacaaaacucacuaucgacagaaugguccccaugcuccguaaccugcgguaauggaauacaagucagaauaaaaccaggaucagcuaauaaaccaaaagacgaauuagacuacgcaaacgacauagaaaagaaaauaugcaaaauggaaaaauguucuucaguauuuaacguagucaacucaucacccguaacuaacauggaaaacauaaccucaggauuucuagguccuuuacucguacuacaagcaggauuuuuccuacuuacccgaauccuaacaauaccucaaucucuagacucaugguggacaucccuaaauuucuuaggcggaucaccaguuugccucggacaaaacucucaaucaccaacuucaaaucacuccccaacaucuugcccaccaauaugcccaggauaucgauggaugugucuacgacguuuuauaauauuucuauuuauacuacuacucugucuaauauuccuauuaguacuacucgacuaucaaggaaugcuccccgucuguccccucauacccggaucaacaacuacaaacaccggaccgugcaaaaccugcacaaccccagcucaaggaaauucaauguucccaucaugcugcuguacaaaaccaacagauggaaacugcacaugcauaccaaucccaucaagcugggccuuugccaaauauuuaugggaaugggccuccgucagauucucauggcucucccuucuaguuccauucguacaaugguuuguaggccuauccccaaccguauggcuauccgccauauggaugaugugguauuggggaccaucacuauacucaauaguauccccauucauaccacuccuacccauauucuuuugccuauggguauacauuuaaggacuagucccuguucccagagcccacuuuuuuuucuuuuuuugaaauaaaauagccugucuuucagaucuaaaaaaaaaaaaaaaaaaaaaaaaaaaaaaaaaaaaaaaaaaaaaaaaaaaaaaaaaaaaaaaaugcaucccccccccccccccccccccccccccccccaaaggcucuuuucagagccaccagaauu

SEQ ID NO: 8940 - RNA, 1560 nt, Artificial Sequence
  mRNA Design a-1 (A64-N5-C30-hSL-N5) comprising derived and/or modified sequence from Pf(3D7)__XP_001351122.1__HsALB_Pf-CSP(199-377)_L(PVTN)_HBsAg (opt6)
aggagagucccgcagucggcguccagcggcucugcuuguucgugugugugucguugcaggccuuauucaagcuuaccaugaaauggguaacauucauaucauuacucuucuuauuuuccucugcauacucagauccaaaugcaaacccaaaugcaaacccaaacgcaaacccaaaugccaauccaaaugcaaacccaaaugcaaacccaaacgcaaacccaaacgcaaacccaaacgcaaacccuaaugcaaacccaaaugcaaauccaaacgcuaacccaaacgcaaacccaaaugccaacccaaacgccaauccaaacgcaaacccaaacgcaaaucccaaugcaaacccuaacaaaaacaaucaaggaaacggacaaggccacaacaugccaaaugacccaaaccgcaauguagacgaaaaugccaacgcaaacuccgcuguaaaaaacaauaacaacgaagaaccuuccgauaaacauauaaaagaauacuuaaauaaaauacaaaauucauuaucaacagaauggucaccaugcucagucacaugcggaaauggaauacaaguaagaauaaaacccgguuccgcaaacaaaccaaaagacgaacuagacuacgcaaaugacaucgaaaaaaaaauaugcaaaauggaaaaauguucuucaguaccaguaacaaacauggaaaacaucaccucuggauuccuaggaccacuauuaguacuacaagcaggauucuuccuccuaacaagaauauuaacaauaccacaaucacuugacucaugguggacaucccucaauuuccuaggaggauccccaguaugucuaggucaaaacucucaaucuccaacauccaaccauucacccacaucaugcccucccauaugcccaggauaccgauggaugugccucagaagauucauaauauuccuauucauauuacuccuauguuuaaucuuucuacuagucuuauuagacuaccaaggaaugcuaccaguaugcccacuaaucccaggauccacaacaacaaacacaggccccugcaaaacauguacaacaccagcacaaggaaacucaauguucccaucaugcuguugcacaaaaccaacagacggaaacugcacaugcaucccaauaccaucaucuugggcauuugcaaaauacuuaugggaaugggcaucaguacgcuuuucauggcucucccuccucguaccauucguccaaugguucguaggucuaucaccaacaguuuggcuauccgcuauauggaugaugugguauuggggcccuucccuauacucaauaguuucaccauuuauaccacuccuaccaauauuuuucugccuuuggguauacauauaaggacuagucccuguucccagagcccacuuuuuuuucuuuuuuugaaauaaaauagccugucuuucagaucuaaaaaaaaaaaaaaaaaaaaaaaaaaaaaaaaaaaaaaaaaaaaaaaaaaaaaaaaaaaaaaaaugcaucccccccccccccccccccccccccccccccaaaggcucuuuucagagccaccagaauu

SEQ ID NO: 8941 - RNA, 1257 nt, Artificial Sequence
  mRNA Design a-1 (A64-N5-C30-hSL-N5) comprising derived and/or modified sequence from Pf(3D7)__XP_001351122.1__HsALB_Pf-CSP(19-272)_L(AAY)_Pf-CSP(346-3 75)_L(AAY)_Pf-CSP(310-327) (opt6)
aggagagucccgcagucggcguccagcggcucugcuuguucgugugugugucguugcaggccuuauucaagcuuaccaugaaauggguaaccuucauuucacuucucuuccuauucuccagcgcauacucacucuuccaagaauaccaaugcuacggcucaaguuccaacacacgaguacuaaacgaauuaaacuacgacaaugcuggaaccaaccuauacaacgaacucgaaaugaacuacuacgguaaacaagaaaacugguauucacuaaaaaaaaacucaaggucccuaggagaaaacgacgacggaaacaacgaagacaacgaaaaauuaagaaaaccaaaacacaaaaaacuaaaacaacccgcagacggaaaccccgacccaaacgcaaacccaaacguagauccaaacgcaaacccaaacguagacccaaacgcaaacccaaacguagacccaaacgcaaacccuaaugcaaacccaaacgcaaacccaaacgcaaacccaaacgcaaacccaaacgcaaacccaaacgcaaaccccaacgccaacccaaacgcaaacccaaacgcaaacccaaacgcaaacccaaacgcaaacccaaacgcaaacccaaacgcaaacccaaacgcaaacccaaaugcaaacccaaacgcaaacccaaacguagacccaaacgcaaacccaaacgcaaacccaaaugcaaacccaaacgcaaacccaaacgcaaacccaaacgcuaacccaaacgcaaacccaaacgcuaauccaaaugcuaaccccaacgcaaacccaaaugcaaacccaaacgcuaauccaaaugcaaauccaaacgcaaacccaaacgcaaacccaaacgcaaacccaaacgcaaacccaaacgcaaauccagccgcauacauaaaacccggcucagcaaacaaaccaaaagacgaacuagacuacgccaacgacauagaaaaaaaaauaugcaaaauggaaaaaugcucagccgcauacgaaccaucagacaaacacaucaaagaauacuuaaacaaaauacaaaacagcuuauaaggacuagucccuguucccagagcccacuuuuuuuucuuuuuuugaaauaaaauagccugucuuucagaucuaaaaaaaaaaaaaaaaaaaaaaaaaaaaaaaaaaaaaaaaaaaaaaaaaaaaaaaaaaaaaaaaugcaucccccccccccccccccccccccccccccccaaaggcucuuuucagagccaccagaauu

SEQ ID NO: 8942 - RNA, 1305 nt, Artificial Sequence
  mRNA Design a-1 (A64-N5-C30-hSL-N5) comprising derived and/or modified sequence from Pf(3D7)__XP_001351122.1__HsALB_Pf-CSP(19-272)_L(AAY)_Pf-CSP(346-3 75)_L(AAY)_Pf-CSP(310-327)_L(AAY)_PADRE (opt6)
aggagagucccgcagucggcguccagcggcucugcuuguucgugugugugucguugcaggccuuauucaagcuuaccaugaaauggguaacauucauaucacuacuauuccuauucucauccgccuacucacucuuucaagaauaucaaugcuacggaucaagcucaaauacaagaguacuaaacgaacuaaacuacgacaacgcaggaaccaaccuauacaacgaacuagaaaugaacuacuacggaaaacaagaaaacugguacucacuuaaaaaaaacucaagaucacuaggagaaaacgacgacggaaacaacgaagacaacgaaaaacuacgaaaaccaaaacauaaaaaacuaaaacaaccagcagacggaaacccagacccaaacgcaaauccaaacguagacccaaaugcaaacccaaacguagacccaaacgcaaacccaaacguagacccaaaugcaaacccaaacgcaaauccaaacgcaaacccaaacgcaaacccaaacgcaaacccaaacgcaaacccaaacgcaaacccaaaugcaaauccaaacgcaaacccaaaugcaaacccaaacgcaaacccaaacgcgaacccaaacgccaaccccaacgcaaacccaaacgcaaauccaaaugcaaacccaaacgccaauccaaacguagacccaaacgcaaauccaaacgcaaacccaaacgcaaacccaaacgcaaacccuaacgcaaacccaaacgcaaacccaaacgcaaacccaaacgccaacccaaacgcaaaccccaacgcaaacccaaacgcaaacccaaacgcaaaccccaacgcaaauccaaacgcuaacccaaacgcuaaccccaacgcaaacccaaaugcaaacccaaacgccaacccagccgcauacauaaaaccaggaucagcaaauaaaccaaaagacgaacuagacuacgcaaacgacauagaaaaaaaaauaugcaaaauggaaaaaugcuccgcagcauacgaaccaucagacaaacacaucaaagaauaccuaaacaaaauccaaaacucacuagccgccuacgcaaaauuugucgcagcauggacacucaaagcagcagcauaaggacuagucccuguucccagagcccacuuuuuuuucuuuuuuugaaauaaaauagccugucuuucagaucuaaaaaaaaaaaaaaaaaaaaaaaaaaaaaaaaaaaaaaaaaaaaaaaaaaaaaaaaaaaaaaaaugcaucccccccccccccccccccccccccccccccaaaggcucuuuucagagccaccagaauu

SEQ ID NO: 8943 - RNA, 1305 nt, Artificial Sequence
  mRNA Design a-1 (A64-N5-C30-hSL-N5) comprising derived and/or modified sequence from Pf(3D7)__XP_001351122.1__HsALB_Pf-CSP(19-272)_L(AAY)_Pf-CSP(310-3 27)_L(AAY)_Pf-CSP(346-375)_L(AAY)_PADRE (opt6)
aggagagucccgcagucggcguccagcggcucugcuuguucgugugugugucguugcaggccuuauucaagcuuaccaugaaauggguaaccuucauaucccuacuauuucuauucuccucagcauacucacuauuccaagaauaccaaugcuacggcucaucaucaaacacaagaguacuaaaugaacuaaacuacgacaacgccggaaccaaccuauacaaugaacucgaaaugaauuacuacggaaaacaagaaaacugguacucacuaaaaaaaaacucaagaagccuaggagaaaacgacgacggaaacaacgaagacaacgaaaaauuacgaaaaccaaaacauaaaaaacuaaaacaacccgccgacggaaacccagacccaaacgcaaacccaaacguagacccaaacgcaaauccaaacguagacccaaacgcaaauccaaauguagacccaaacgcaaacccaaacgcaaacccaaacgcaaacccaaacgcaaacccgaacgcaaauccaaacgcaaacccaaacgcaaacccaaacgcaaacccaaacgcaaacccaaacgcaaaccccaacgcaaacccaaaugcaaacccaaacgcaaacccaaaugcaaauccaaacgcaaacccaaacgcaaacccaaacgcaaacccaaacguagacccaaaugcaaaccccaacgcaaacccaaacgcaaacccaaacgcaaacccaaacgcaaacccaaacgcaaacccaaacgcaaacccaaacgcaaacccaaacgccaauccaaacgcaaauccaaacgcaaacccaaacgcaaacccaaacgcaaacccaaacgcaaacccaaacgcaaacccaaacgcaaacccaaaugcaaacccaaacgcaaacccagcagcauacgaaccuucagacaaacacauaaaagaauacuuaaacaaaauacaaaacucacuagcagccuacaucaaaccaggauccgcaaacaaaccaaaagacgaacuagacuacgcaaacgacauagaaaaaaaaauauguaaaauggaaaaaugcucagccgcauaugcuaaauucgucgcagcauggaccuuaaaagcagcagcauaaggacuagucccuguucccagagcccacuuuuuuuucuuuuuuugaaauaaaauagccugucuuucagaucuaaaaaaaaaaaaaaaaaaaaaaaaaaaaaaaaaaaaaaaaaaaaaaaaaaaaaaaaaaaaaaaaugcaucccccccccccccccccccccccccccccccaaaggcucuuuucagagccaccagaauu

SEQ ID NO: 8944 - RNA, 1359 nt, Artificial Sequence
  mRNA Design a-1 (A64-N5-C30-hSL-N5) comprising derived and/or modified sequence from Pf(3D7)__XP_001351122.1__HsALB_Pf-CSP(19-272)_L(AAY)_Pf-CSP(310-3 27)_L(AAY)_Pf-CSP(346-375)_L(AAY)_PADRE_L(AAY)_P2 (opt6)
aggagagucccgcagucggcguccagcggcucugcuuguucgugugugugucguugcaggccuuauucaagcuuaccaugaaaugggucaccuucaucucacuacuauuuuuauucuccagcgcauacucauuauuccaagaauaccaaugcuauggcucaagcucaaacacaagaguauuaaacgaacuaaacuacgauaacgccggaacaaaccuauacaacgaacucgaaaugaacuacuauggaaaacaagaaaacugguacucacuuaaaaaaaauucaagaucucuaggagaaaacgacgacggaaacaaugaagacaacgagaaauuaagaaaaccaaaacacaaaaaacuaaaacaaccagcagacggaaacccagacccaaacgcaaacccaaacguagacccaaacgcaaacccaaacguagacccaaacgcaaacccaaacguagauccgaacgcaaauccaaacgcaaauccaaacgcaaacccaaaugcaaacccaaaugcaaacccaaaugcaaacccaaacgcaaacccaaacgcaaacccaaacgcaaaccccaacgcaaacccaaacgcaaauccaaacgcaaacccaaacgcaaacccaaacgcaaaccccaacgcaaacccaaacgcaaacccgaacgcgaacccaaacguggauccaaacgcaaacccaaaugcaaaucccaacgcaaacccaaaugcaaacccaaacgcaaacccaaacgcaaacccaaacgcaaacccaaaugcaaacccaaacgcaaacccaaacgcaaacccaaacgcaaacccaaacgcaaauccaaacgcaaauccaaaugcaaacccaaacgcaaacccaaacgcaaaccccaacgcaaauccaaacgcaaacccagccgcauacgaaccaucagacaaacauauaaaagaauaucuaaacaaaauucaaaacucacucgcagcauacauaaaaccaggaagcgcaaacaaaccuaaagacgaacuagacuacgcaaacgacauagaaaaaaaaauaugcaaaauggaaaaaugcucagcagcguacgcaaaauucguagcagcauggacacuaaaagcagcagccgcagcauaccaauacauaaaagcaaauucaaaauucaucggaauuacagaacuauaaggacuagucccuguucccagagcccacuuuuuuuucuuuuuuugaaauaaaauagccugucuuucagaucuaaaaaaaaaaaaaaaaaaaaaaaaaaaaaaaaaaaaaaaaaaaaaaaaaaaaaaaaaaaaaaaaugcaucccccccccccccccccccccccccccccccaaaggcucuuuucagagccaccagaauu

SEQ ID NO: 8945 - RNA, 1323 nt, Artificial Sequence
  mRNA Design a-1 (A64-N5-C30-hSL-N5) comprising derived and/or modified sequence from Pf(3D7)__XP_001351122.1__HsALB_Pf-CSP(19-272)_L(AAY)_Pf-CSP(310-3 27)_Linker (AAY)_Pf-CSP(346-397) (opt6)
aggagagucccgcagucggcguccagcggcucugcuuguucgugugugugucguugcaggccuuauucaagcuuaccaugaaauggguuacauucauaucauuacuauuccucuuuuccucagcauacucacucuuucaagaauaccaaugcuacggcucauccucaaacacaagaguacucaacgaacucaacuaugacaacgcaggaacaaaccucuacaacgaacuugaaaugaauuacuauggaaaacaagaaaacugguacucauuaaaaaaaaacucaagauccuuaggcgaaaacgacgacggaaacaacgaagacaacgagaaacuccgaaaaccaaaacacaaaaaacuaaaacaaccagcagacggaaacccagacccaaacgcaaacccaaacguagacccaaacgcaaacccaaacguagacccaaacgcaaacccaaacguagacccaaacgcaaacccaaacgcaaacccaaacgcaaacccaaacgcaaacccaaacgcaaacccaaacgcaaacccaaacgcaaacccaaacgcaaacccaaacgcaaacccaaacgcaaacccaaacgccaacccaaacgcaaacccaaacgccaacccaaacgcaaacccaaacgcaaacccaaacgcaaauccaaacgccaacccaaacguagacccaaacgcaaacccaaacgcaaacccaaacgcaaacccaaacgcaaaccccaacgccaacccaaacgccaaccccaacgcaaauccaaacgcaaacccaaacgcaaaccccaacgcaaacccaaacgcaaacccaaacgcaaacccaaacgcuaacccaaacgcaaaccccaacgcaaauccaaacgcaaacccaaacgcaaacccaaaugcaaacccagcagcauaugaaccuucagauaaacacauaaaagaauaccuaaacaaaauccaaaacucucucgcagccuacaucaaaccaggaucagcaaacaaacccaaagacgaacuagacuacgcaaaugauaucgaaaaaaaaauaugcaaaauggaaaaaugcucgagcguauuuaacguaguaaacucaucaaucggacucauaaugguacuaucauuucuauuccucaacuaaggacuagucccuguucccagagcccacuuuuuuuucuuuuuuugaaauaaaauagccugucuuucagaucuaaaaaaaaaaaaaaaaaaaaaaaaaaaaaaaaaaaaaaaaaaaaaaaaaaaaaaaaaaaaaaaaugcaucccccccccccccccccccccccccccccccaaaggcucuuuucagagccaccagaauu

SEQ ID NO: 8946 - RNA, 1923 nt, Artificial Sequence
  mRNA Design a-1 (A64-N5-C30-hSL-N5) comprising derived and/or modified sequence from Pf(3D7)__XP_001351122.1__LumSynt_L(GGS4-GGG)_Pf-CSP(19-397) (opt11)
aggagagucccgcagucggcguccagcggcucugcuuguucgugugugugucguugcaggccuuauucaagcuuaccaugcaaauauacgagggcaaacucacggcugaaggccuacgcuuuggcaucgucgcaucacgguucaaucacgcacucguggacaggcucguagaaggugccaucgacgcaauaguacgccacggcgggcgcgaagaggacauaacgcuaguacgcguacccggaagcugggaaauccccguagccgcaggcgaacucgcacgcaaagaagacaucgacgccgugaucgcaauaggaguccugauccgaggcgcaacaccacacuucgacuacaucgccuccgaagucucaaaaggccuagcggaucugagccucgaacugcgcaaaccuauaacauucggcgucauaacagccgacacauuagaacaggccauagaaagagccggaaccaaacauggaaacaaaggcugggaagcggcccuaagcgccaucgaaauggcaaaccucuucaaaagccugcgcggaggaucaggcggcagcggcggcuccggaggaagcggcggcggucuuuuucaagaauaccaaugcuacggcuccucaucgaacacacgcguacucaaugaacugaacuacgacaaugcaggaaccaaccucuacaacgaacucgagaugaacuacuacggcaaacaagaaaacugguacucgcuaaagaaaaacuccagaucccugggcgaaaacgacgacggaaacaacgaagacaacgaaaaacuacgcaaaccaaaacacaagaaacuaaaacaaccagcagacggaaacccagacccaaacgcgaacccaaacgucgacccaaacgcaaacccaaacguagacccaaacgcaaacccaaacgucgaccccaacgcaaacccaaacgccaaccccaacgcaaaccccaacgcgaacccaaacgcgaaccccaacgcaaacccaaacgcaaaccccaacgcaaacccaaacgcaaacccaaacgccaacccgaaugccaacccgaacgcaaacccgaacgcaaaccccaacgcgaaccccaacgcaaacccaaaugccaaccccaacgcaaaccccaacguagacccgaacgcaaacccgaacgcaaacccgaacgcaaacccaaacgcaaacccaaacgccaaccccaacgccaacccaaacgcgaacccaaaugcaaaccccaacgccaacccgaacgccaacccaaacgcaaacccgaacgcaaaccccaacgcaaaccccaacgcaaaccccaacgcaaacccgaacgccaacccaaacgcaaacccaaacgcaaacccaaacaaaaacaaccaaggaaacgggcaaggccacaacaugcccaacgacccaaaccgaaauguagaugaaaacgcaaacgccaacagcgcggucaaaaacaacaacaacgaagaacccucggacaaacacauaaaagaauaccuaaacaaaauccagaacucccucucaacagaauggucccccugcucaguuaccugcgguaaugguauacaaguccgcauuaaaccgggaucugccaacaaaccaaaagaugagcuagacuacgccaacgacauagaaaagaaaaucugcaaaauggagaaaugcuccucagucuucaacguaguaaacagcucgauagggcucaucaugguacucuccuuuuuauuccucaacuaaggacuagucccuguucccagagcccacuuuuuuuucuuuuuuugaaauaaaauagccugucuuucagaucuaaaaaaaaaaaaaaaaaaaaaaaaaaaaaaaaaaaaaaaaaaaaaaaaaaaaaaaaaaaaaaaaugcaucccccccccccccccccccccccccccccccaaaggcucuuuucagagccaccagaauu

SEQ ID NO: 8947 - RNA, 1785 nt, Artificial Sequence
  mRNA Design a-1 (A64-N5-C30-hSL-N5) comprising derived and/or modified sequence from Pf(3D7)__XP_001351122.1__HsALB_Pf-CSP(19-272)_L(PVTN)_HBsAg (opt11)
aggagagucccgcagucggcguccagcggcucugcuuguucgugugugugucguugcaggccuuauucaagcuuaccaugaaaugggucaccuucaucucccuccucuuccucuucuccucugccuacucacucuuccaagaauaccaaugcuacggcuccucuuccaacacccgcguacucaacgaacucaacuaugacaaugcaggaaccaaccuauacaacgagcuagagaugaacuacuacggcaaacaagaaaacugguacucccucaagaaaaacucacgcucccuuggcgaaaaugacgacggcaacaacgaagacaacgaaaaacuucgcaaacccaaacacaagaaauuaaaacaaccagccgacggcaacccagaccccaacgccaaccccaacgucgaccccaacgccaacccuaacgucgaccccaacgcaaacccuaacgucgauccaaacgccaaccccaacgcuaaccccaacgcaaauccgaacgcaaaccccaacgccaacccuaacgccaaccccaacgccaacccaaacgccaaccccaacgcuaaccccaacgcaaacccgaacgccaaccccaacgccaaccccaacgcaaaccccaacgccaaccccaaugcaaaccccaacgccaacccaaaugccaaccccaacgucgaccccaacgcaaaccccaacgcuaacccuaacgcuaacccaaacgccaacccaaacgcuaaccccaacgccaaccccaacgccaaccccaacgcaaacccaaacgcaaacccuaacgccaacccuaacgcaaaccccaacgcgaaccccaacgcaaaccccaacgcaaaccccaacgccaaccccaacgccaacccaaacgccaauccaaacgcaaaucccccagucaccaacauggaaaacaucaccucaggcuuccucggcccccuucucguccuacaagcugguuucuuccuucuaacccgcauccucacgaucccccaaucccucgacucaugguggaccucacucaacuuucucggaggcucacccguaugccucggacaaaacucccaaucccccaccuccaaccauuccccaaccucaugcccaccaauaugccccggcuaccguuggaugugccuccgccguuucaucauauuccuuuucauacuccuccucugccucaucuuccugcucgugcuccuagacuaucaagguaugcuacccguaugcccacucauccccggcucaaccacgacaaacacuggccccugcaaaacaugcaccacacccgcacaaggaaacuccauguuccccucaugcugcugcaccaaaccaacagacggaaacuguaccugcaucccuauccccuccuccugggccuucgcaaaauaucuaugggagugggccagcguacgcuuuuccuggcuuucccuccugguccccuucguccaaugguucguaggccucuccccaaccguauggcuauccgcaaucuggaugaugugguacuggggcccaucucucuacucaauaguaucacccuucaucccacuccuccccaucuucuucugccucuggguauacaucuaaggacuagucccuguucccagagcccacuuuuuuuucuuuuuuugaaauaaaauagccugucuuucagaucuaaaaaaaaaaaaaaaaaaaaaaaaaaaaaaaaaaaaaaaaaaaaaaaaaaaaaaaaaaaaaaaaugcaucccccccccccccccccccccccccccccccaaaggcucuuuucagagccaccagaauu

SEQ ID NO: 8948 - RNA, 1902 nt, Artificial Sequence
  mRNA Design a-1 (A64-N5-C30-hSL-N5) comprising derived and/or modified sequence from Pf(3D7)__XP_001351122.1__HsALB_Pf-CSP(19-272)_L(AAY)_Pf-CSP(346-3 65)_L(AAY)_PADRE_L(PVTN)_HBsAg (opt11)
aggagagucccgcagucggcguccagcggcucugcuuguucgugugugugucguugcaggccuuauucaagcuuaccaugaaauggguaaccuucauaucccuucuauucuuauucucuuccgcauacucccucuuccaagaauaucagugcuacggcucauccucaaacacacgaguccucaacgaacucaacuacgacaacgccggcaccaaucucuacaacgaacucgaaaugaacuacuacggcaaacaagaaaacugguacucccuuaagaaaaacucacgcucucucggcgaaaacgacgacggcaacaacgaagacaacgaaaaauuacgcaaacccaaacacaagaaacucaaacaaccagccgacggcaacccagaccccaaugcaaacccuaacgucgaccccaacgccaacccuaacgucgacccaaacgccaacccgaacgucgaccccaacgcaaacccaaacgccaaccccaaugccaaucccaacgccaacccuaacgccaaccccaacgccaaccccaacgccaacccuaacgccaaccccaaugcaaacccaaacgccaacccaaacgcaaacccaaacgccaauccaaacgccaacccaaacgccaaccccaacgccaacccaaacgccaaucccaacgccaaccccaacguagaccccaaugcgaacccaaacgccaacccuaacgccaaccccaacgcaaacccaaacgcuaacccaaacgcaaaccccaacgcaaaccccaacgcaaacccgaacgcgaaccccaacgccaauccaaacgcaaacccuaacgcaaacccaaacgccaacccaaacgccaacccaaacgcaaacccaaacgccaauccaaacgcaaacccgaacgcaaaccccgccgcuuacaucaaacccggaucggccaacaaacccaaagacgaacuugauuacgccaacgacaucgaagcagccuacgcaaaauucguagcggccuggacccuaaaagcagcagcacccgucacaaacauggaaaacaucacaucuggcuucuuaggcccacuccuaguccuccaggccggcuucuuccuacuaacccguauacucaccauaccacaaucacucgacucaugguggaccucccuaaacuuccucggcggaucacccgucugccugggccaaaacucgcaaucccccaccucaaaucauucgcccacaucaugcccgcccaucugccccggcuaccgguggaugugccuccgcagauucauaaucuuccucuucauacuacuacuuugccuaaucuuccucuuaguccuacucgacuaccaaggcaugcuccccgucugcccccuuauacccggcuccaccaccaccaauaccggccccugcaaaaccugcacaacacccgcccaaggcaacucaauguucccguccugcuguugcaccaaaccaaccgacggaaauugcacaugcaucccaauccccucaucaugggcauucgccaaauaccucugggaaugggccuccguccguuucuccuggcucagccuacucguucccuucguccaaugguuugucggccuuucaccuacaguauggcuauccgccauauggaugaugugguacuggggacccucacucuacucaauugucucccccuucaucccauuacuccccaucuucuucugccucugggucuacauauaaggacuagucccuguucccagagcccacuuuuuuuucuuuuuuugaaauaaaauagccugucuuucagaucuaaaaaaaaaaaaaaaaaaaaaaaaaaaaaaaaaaaaaaaaaaaaaaaaaaaaaaaaaaaaaaaaugcaucccccccccccccccccccccccccccccccaaaggcucuuuucagagccaccagaauu

SEQ ID NO: 8949 - RNA, 2121 nt, Artificial Sequence
  mRNA Design a-1 (A64-N5-C30-hSL-N5) comprising derived and/or modified sequence from Pf(3D7)__XP_001351122.1__HsALB_Pf-CSP(19-384)_L(PVTN)_HBsAg (opt11)
aggagagucccgcagucggcguccagcggcucugcuuguucgugugugugucguugcaggccuuauucaagcuuaccaugaaaugggucaccuucauaucacuccuauuccuauuuucaagcgccuacucccucuuccaagaauaucaaugcuauggcucaagcucaaacacccgcguccucaacgagcuaaacuacgacaacgcaggaaccaaccucuacaacgaacuggaaaugaacuacuacggaaaacaagagaacugguacuccuuaaagaaaaacucccgcucccucggcgaaaacgaugacgguaacaacgaagacaaugaaaaacuccgaaaacccaaacacaagaaacuaaaacaaccagccgacggaaaccccgacccgaacgcaaaccccaacguagacccaaacgcaaacccuaauguagacccaaacgccaacccaaacgucgacccaaacgcaaacccaaacgcuaaccccaacgccaacccaaacgccaaccccaacgccaaccccaaugccaacccaaacgcgaaccccaacgcaaaccccaacgccaacccgaacgccaacccaaacgccaacccaaacgccaaccccaacgcgaacccaaacgccaacccaaacgcuaaccccaacgcaaaccccaacgccaacccuaacgucgacccaaacgccaaucccaacgccaaccccaacgcaaaccccaacgccaacccgaacgcgaaccccaacgcaaaccccaacgcaaacccaaacgccaaccccaacgccaacccaaacgccaacccgaacgccaacccaaacgcgaaucccaaugccaaccccaacgccaauccuaaugcaaacccaaacgcaaaccccaacgccaauccgaacgcaaacccgaacaaaaacaaccaagguaacggccaaggccacaacaugcccaacgaccccaaccgcaacgucgacgaaaacgcaaacgccaacuccgcaguuaaaaacaacaacaacgaagaaccaucagacaaacacauaaaagaauaccucaacaaaauccaaaacucgcucuccaccgaauggucccccuguagcguaaccugcgguaauggaauacaaguccgaaucaaaccaggcucugccaacaaacccaaagacgaacuagacuacgccaacgacauugaaaagaaaaucugcaaaauggaaaaauguagcuccgucuucaacguagucaacuccucccccguuaccaacauggagaacauaaccuccggcuuccucggcccccuucucgugcuacaggccggauucuuccuccuaaccaggauccuaaccaucccccagucacucgacuccugguggaccucacucaacuuccucggcggaucccccgucugccucggacaaaacucccaaucccccaccucaaaccacuccccaaccucuugcccgcccauaugccccgguuaccgcuggaugugccuucgccgcuucaucauauuucuauucauccuccuucucugccuaauauuccuacucguacuccucgacuaccaaggcaugcuacccgucugcccucuuauacccggauccacgacaaccaacaccggccccugcaaaaccugcaccacacccgcccaaggcaacucuauguuccccucaugcugcugcacaaaacccaccgacggcaacugcacaugcauaccaauccccucuuccugggccuuugccaaauaccuuugggaaugggcuuccguccguuuuuccugguuaucccuccuggucccauucguccaaugguucgucggccuuucaccaaccgucuggcuauccgccaucuggaugaugugguacuggggucccucccucuacagcaucgucucaccauuuaucccccuccugcccaucuucuucugcuuguggguauacauaugaggacuagucccuguucccagagcccacuuuuuuuucuuuuuuugaaauaaaauagccugucuuucagaucuaaaaaaaaaaaaaaaaaaaaaaaaaaaaaaaaaaaaaaaaaaaaaaaaaaaaaaaaaaaaaaaaugcaucccccccccccccccccccccccccccccccaaaggcucuuuucagagccaccagaauu

SEQ ID NO: 8950 - RNA, 1938 nt, Artificial Sequence
  mRNA Design a-1 (A64-N5-C30-hSL-N5) comprising derived and/or modified sequence from Pf(3D7)__XP_001351122.1__HsALB_Pf-CSP(19-384)_L(SGG)_Ferritin (opt11)
aggagagucccgcagucggcguccagcggcucugcuuguucgugugugugucguugcaggccuuauucaagcuuaccaugaaaugggucaccuucauaucacuacuuuuccuguucuccucagcauacucacucuuccaagaguaccaaugcuacggcucaucauccaauacccgcguacuuaacgaauuaaacuacgacaacgcaggcaccaaccucuacaacgaacucgaaaugaacuauuacggaaaacaagaaaacugguacucacuaaagaaaaacagcagaucccucggcgaaaacgacgacggcaauaacgaagacaacgaaaaacugagaaaaccuaaacacaagaaacucaaacaacccgcagacggcaaccccgaccccaacgccaacccaaacguagaccccaacgccaaccccaacgucgaccccaacgccaacccuaaugucgacccaaacgcaaacccuaacgcaaaccccaaugccaacccaaacgccaaccccaacgcaaaccccaacgcaaauccaaacgcaaaucccaacgcaaaccccaaugccaaccccaacgcaaacccaaacgccaaccccaacgcaaaccccaacgcuaacccaaacgccaacccaaacgcaaacccaaacgccaaccccaacgcuaaccccaacgucgaccccaacgccaaccccaacgcaaacccaaacgccaaccccaaugcaaacccaaacgccaaccccaacgcaaacccaaacgccaacccaaacgccaaccccaacgcaaaccccaacgcuaaccccaacgcaaaccccaaugcaaacccgaacgccaacccaaacgcaaacccaaacgccaacccaaacgccaaccccaacgccaacccaaacgccaacccaaacaaaaacaaccaagguaacggacaaggccacaacaugcccaacgauccuaaccgcaacguagacgaaaacgccaacgcaaacagcgcagucaaaaacaacaacaacgaggaaccaucagacaaacacaucaaagaauaccucaacaaaauccaaaacucccuauccacagaauggucacccugcuccguaaccugcggcaacggcauccaaguacgcaucaaacccggauccgcaaacaaaccaaaagaugaauuagauuaugcaaacgacauagaaaagaaaauaugcaaaauggaaaaaugcuccuccguauucaacguagucaacuccucuucagggggacucuccaaagacaucaucaaacuucucaacgaacaagucaacaaagagaugaacagcuccaaccucuacaugucaaugucaagcuggugcuacacacacucacuggacggcgccggccucuuccuauucgaccacgccgcagaagaauacgaacacgccaagaaacuuauaaucuuccuaaacgaaaauaacguaccuguccaacucacaucaaucucggccccagaacauaaauucgaagggcucacgcaaauauuucaaaaagcauacgaacacgaacagcacaucuccgaaucaaucaacaacauugucgaccacgcaaucaaauccaaagaccacgccacauucaacuuccuacaaugguacguggccgaacaacacgaagaagaaguccucuucaaagacauacuagacaaaaucgaacuaaucggcaacgaaaaccacggccucuaccuagccgaccaauacguaaaaggaaucgcgaaaucccgcaaauccuaaggacuagucccuguucccagagcccacuuuuuuuucuuuuuuugaaauaaaauagccugucuuucagaucuaaaaaaaaaaaaaaaaaaaaaaaaaaaaaaaaaaaaaaaaaaaaaaaaaaaaaaaaaaaaaaaaugcaucccccccccccccccccccccccccccccccaaaggcucuuuucagagccaccagaauu

SEQ ID NO: 8951 - RNA, 1899 nt, Artificial Sequence
  mRNA Design a-1 (A64-N5-C30-hSL-N5) comprising derived and/or modified sequence from Pf(3D7)__XP_001351122.1__HsALB_Pf-CSP(93-384)_L(PVTN)_HBsAg (opt11)
aggagagucccgcagucggcguccagcggcucugcuuguucgugugugugucguugcaggccuuauucaagcuuaccaugaaaugggucaccuuuaucucacuccuauuucucuucucuuccgcauacuccaaacucaaacaacccgcagacggaaaccccgacccaaacgcaaaccccaacguagaccccaacgccaaccccaacgucgaccccaacgccaaccccaacguagaccccaacgcaaaccccaacgccaacccaaacgccaaccccaacgccaaccccaacgccaaucccaacgccaacccaaacgcaaaucccaacgcaaaccccaacgccaaccccaacgccaacccaaacgccaauccaaacgcaaacccuaacgccaacccuaacgcgaaccccaacgccaaccccaacgcaaaccccaacgccaaccccaaugucgaccccaacgccaaccccaacgccaaccccaacgcaaaccccaacgcaaacccaaacgccaaucccaacgccaaccccaacgcaaacccuaacgccaaccccaaugccaauccuaacgccaaccccaacgccaacccuaacgccaacccaaacgccaaccccaacgccaaccccaacgccaacccuaacgccaacccuaacgccaacccaaacgccaauccaaacaagaacaaccaaggcaacggucaaggccacaauaugccaaacgacccaaaccgaaacguagacgaaaacgccaacgccaacuccgccgucaaaaacaacaacaacgaagaacccuccgacaaacacaucaaagaauaucugaacaaaauccaaaacucccucuccaccgaauggucccccugcuccgucacuuguggcaauggcauacaaguccgcaucaaacccggcucagccaacaaacccaaagacgaacucgacuacgcaaacgacaucgaaaagaaaauaugcaaaauggaaaaaugcuccucugucuucaacgucgucaacuccucgcccguaaccaacauggaaaacaucaccucaggauuccucggcccccuacucguccuccaagccggcuucuuccuccucacccgaauccuuacaaucccccaaucccuugacucaugguggaccucccuuaauuuccucggcgguucccccgucugccuuggccaaaacucacaaucccccaccucaaaccacucccccacuuccugcccgcccauaugccccggcuaccgcuggaugugccuccgccgguucaucauauuccucuucauccuacuccucugccuuauauuucuauuaguccuccuagacuaccaaggaaugcuccccguaugcccacuaauccccggauccaccaccaccaacaccggccccugcaaaaccugcaccaccccugcacaaggaaacuccauguucccaucuuguugcugcacaaaaccaaccgacggcaacuguaccugcauccccaucccuucaucaugggccuucgccaaauaccuaugggaaugggccucaguacguuucuccuggcuaucccuccucgucccauucguucaaugguucgucggccuaucccccacgguauggcucuccgcaauauggaugaugugguacuggggccccucacuauacaguauaguuucccccuucauaccccuccuccccauauucuucugccucuggguauacaucuagggacuagucccuguucccagagcccacuuuuuuuucuuuuuuugaaauaaaauagccugucuuucagaucuaaaaaaaaaaaaaaaaaaaaaaaaaaaaaaaaaaaaaaaaaaaaaaaaaaaaaaaaaaaaaaaaugcaucccccccccccccccccccccccccccccccaaaggcucuuuucagagccaccagaauu

SEQ ID NO: 8952 - RNA, 1560 nt, Artificial Sequence
  mRNA Design a-1 (A64-N5-C30-hSL-N5) comprising derived and/or modified sequence from Pf(3D7)__XP_001351122.1__HsALB_Pf-CSP(199-377)_L(PVTN)_HBsAg (opt11)
aggagagucccgcagucggcguccagcggcucugcuuguucgugugugugucguugcaggccuuauucaagcuuaccaugaaauggguaaccuucaucucccuccuauucuuauucucaucagccuacuccgacccaaacgcaaaccccaaugccaaccccaacgccaaccccaacgccaaucccaacgccaaccccaacgccaaucccaaugcuaaccccaacgccaacccaaacgccaacccaaacgcaaaccccaacgccaaccccaacgccaaccccaacgccaacccaaacgccaaccccaacgcaaaccccaacgccaacccaaacgccaaccccaacgccaacccaaacaaaaacaaucaaggcaacggccaaggacacaacaugcccaacgaccccaaccgcaacgucgacgaaaacgcaaacgccaacucugcagucaaaaacaacaacaacgaagaacccuccgacaaacacauaaaagaauaccucaacaaaauccaaaacucccucuccacagaaugguccccaugcuccgucacgugcggcaacggcauccaaguacgcaucaaacccggcucugccaacaaaccuaaagacgaacucgacuacgccaacgacaucgaaaagaaaaucugcaaaauggaaaaaugcuccucaguccccguaacuaacauggaaaacaucacguccggcuuccucggcccccuccuaguccuccaagccggcuucuuccuacucacacgcauucuuaccaucccgcaaucacucgacuccugguggaccucccucaacuucuuaggcggcuccccugucugccucggccaaaacucacaaucccccacuucaaaccacucacccaccagcugcccacccauaugcccaggauaccgcuggaugugccuccgccguuucauaaucuuccucuucauacuccuacucugccuaaucuuccuccucguacuccuagacuaccaaggcaugcuccccgucugcccacucauccccggaagcacuacaaccaacaccggccccugcaaaacaugcaccacccccgcacaaggcaacuccauguuccccuccugcugcugcacaaaacccacugauggcaacugcacuugcauccccauccccuccucaugggccuucgccaaauaucucugggaaugggccagcguccgguucucuuggcucucacuccuaguccccuucguucaaugguucguaggccuaucccccaccgucuggcucuccgcaauauggaugaugugguauuggggccccucccucuacuccauuguaucccccuucaucccacuacuccccaucuucuucugccuuugggucuacauauaaggacuagucccuguucccagagcccacuuuuuuuucuuuuuuugaaauaaaauagccugucuuucagaucuaaaaaaaaaaaaaaaaaaaaaaaaaaaaaaaaaaaaaaaaaaaaaaaaaaaaaaaaaaaaaaaaugcaucccccccccccccccccccccccccccccccaaaggcucuuuucagagccaccagaauu

SEQ ID NO: 8953 - RNA, 1257 nt, Artificial Sequence
  mRNA Design a-1 (A64-N5-C30-hSL-N5) comprising derived and/or modified sequence from Pf(3D7)__XP_001351122.1__HsALB_Pf-CSP(19-272)_L(AAY)_Pf-CSP(346-3 75)_L(AAY)_Pf-CSP(310-327) (opt11)
aggagagucccgcagucggcguccagcggcucugcuuguucgugugugugucguugcaggccuuauucaagcuuaccaugaaauggguaaccuucaucucacuccuauuccuguucuccagugcauacucacucuuccaagaauaccaaugcuacggcuccagcagcaacacgcgaguccucaacgaacuaaacuacgauaacgccggaaccaaccuuuacaacgaacucgaaaugaacuacuacggcaaacaagaaaacugguacucacuaaaaaaaaacagcagaucacuaggcgaaaacgacgacggaaacaacgaagacaacgaaaaacuacgcaagcccaaacacaagaaacucaaacaacccgcagacggaaacccagaccccaacgcaaaccccaacguagaccccaacgcaaaccccaacguagaccccaacgcaaaucccaacguagacccaaacgcaaaccccaacgcaaacccaaacgcaaacccaaacgcgaacccaaacgcaaacccaaacgcaaacccgaacgccaacccaaacgcaaacccaaacgcuaaccccaacgcaaacccaaacgcaaacccaaacgcaaacccaaacgcaaacccaaacgcaaacccaaacgcaaacccgaacgcaaacccaaacgcaaaccccaacguagacccaaacgccaacccaaacgcaaaccccaacgccaacccaaacgcaaacccaaacgcaaacccaaacgcaaacccaaacgcaaacccaaacgcaaacccaaacgcaaaccccaacgcgaacccaaacgccaacccaaacgcaaacccaaacgcgaacccaaacgccaaccccaacgcaaaccccaacgcaaaccccaacgcaaacccaaacgcaaaccccgccgcuuacauaaaacccggcucggccaauaaaccaaaagacgaacucgacuacgccaacgacauagaaaaaaaaauaugcaaaauggaaaaaugcagcgccgccuacgaaccaucagacaaacacaucaaagaauaccucaacaaaauacaaaacagccucuaaggacuagucccuguucccagagcccacuuuuuuuucuuuuuuugaaauaaaauagccugucuuucagaucuaaaaaaaaaaaaaaaaaaaaaaaaaaaaaaaaaaaaaaaaaaaaaaaaaaaaaaaaaaaaaaaaugcaucccccccccccccccccccccccccccccccaaaggcucuuuucagagccaccagaauu

SEQ ID NO: 8954 - RNA, 1305 nt, Artificial Sequence
  mRNA Design a-1 (A64-N5-C30-hSL-N5) comprising derived and/or modified sequence from Pf(3D7)__XP_001351122.1__HsALB_Pf-CSP(19-272)_L(AAY)_Pf-CSP(346-3 75)_L(AAY)_Pf-CSP(310-327)_L(AAY)_PADRE (opt11)
aggagagucccgcagucggcguccagcggcucugcuuguucgugugugugucguugcaggccuuauucaagcuuaccaugaaauggguaacauuuaucucccuccucuuccucuuuuccuccgcauacucacucuuccaagaauaccaaugcuacggaucaagcuccaacacccgcguccuuaacgaacuuaacuacgacaacgccggcaccaacuuauacaacgaacucgagaugaacuacuacggcaaacaagaaaacugguacucccucaaaaaaaacuccagaucccucggcgaaaacgacgacggaaacaacgaagacaacgaaaaacuccgcaaacccaaacacaaaaaacucaaacaacccgcugacggcaacccugaccccaacgccaaccccaacguagaccccaacgccaaucccaacguagacccaaacgccaaccccaacguagaccccaacgccaaccccaacgcaaacccaaacgccaaccccaacgccaaccccaacgcgaacccaaacgccaaccccaacgccaacccuaacgccaacccgaacgccaaccccaacgccaaccccaacgccaaccccaacgcgaaccccaacgcaaaccccaacgccaaccccaacgcaaaccccaacgccaaccccaacgccaaccccaacguagaccccaacgccaacccaaacgccaacccaaacgcaaaccccaacgccaauccaaacgcaaaccccaacgcaaaccccaaugccaacccaaacgccaaccccaacgccaacccaaacgccaacccaaacgccaaccccaacgcaaacccaaacgcaaaccccaacgcaaacccuaacgccaacccaaacgccaacccaaacgcaaaccccaacgcaaaccccgccgccuacaucaaaccaggcuccgccaauaaaccaaaagacgaacucgacuacgcaaaugacauagaaaaaaaaauaugcaaaauggaaaaaugcuccgcagccuacgaacccagcgacaaacauaucaaagaauacuuaaacaaaauccaaaacucccuagccgccuacgccaaauucgucgcagccuggacccucaaagccgccgccuaaggacuagucccuguucccagagcccacuuuuuuuucuuuuuuugaaauaaaauagccugucuuucagaucuaaaaaaaaaaaaaaaaaaaaaaaaaaaaaaaaaaaaaaaaaaaaaaaaaaaaaaaaaaaaaaaaugcaucccccccccccccccccccccccccccccccaaaggcucuuuucagagccaccagaauu

SEQ ID NO: 8955 - RNA, 1305 nt, Artificial Sequence
  mRNA Design a-1 (A64-N5-C30-hSL-N5) comprising derived and/or modified sequence from Pf(3D7)__XP_001351122.1__HsALB_Pf-CSP(19-272)_L(AAY)_Pf-CSP(310-3 27)_L(AAY)_Pf-CSP(346-375)_L(AAY)_PADRE (opt11)
aggagagucccgcagucggcguccagcggcucugcuuguucgugugugugucguugcaggccuuauucaagcuuaccaugaaaugggugaccuuuaucucacuccucuuccucuucucaagcgcauacucacucuuccaagaauaccaaugcuacgguucaagcucaaacacaagaguccucaacgaacucaacuacgacaacgccggaaccaaccucuacaacgaacucgaaaugaacuacuacggcaaacaagaaaacugguacucacucaaaaaaaacagcaggucccuaggcgaaaacgacgacggaaacaacgaagacaacgaaaaacuccgcaaaccaaaacacaaaaaacugaaacaacccgcagacggaaacccagaccccaacgcaaacccgaacgucgacccgaacgccaacccaaacguagacccaaacgcaaaccccaacgucgacccaaacgcaaacccaaacgcaaacccaaacgcaaacccgaacgcaaacccaaacgcgaacccaaacgcaaacccaaacgcaaacccaaacgccaacccaaacgcaaacccaaaugcaaaccccaacgcaaacccgaacgcaaacccaaacgcaaaccccaacgcaaacccaaacgcuaacccaaacgcgaaccccaacgcaaacccaaacguggacccaaacgcaaacccaaacgcaaacccaaacgcgaacccgaacgcaaacccaaacgcgaacccaaacgcaaaccccaacgcaaacccaaacgcaaacccaaacgccaacccaaacgcaaacccaaacgcgaaccccaacgccaacccaaacgcaaacccaaacgcaaacccaaacgcaaacccaaacgcaaacccaaacgccaacccaaacgcaaacccagcugccuacgaacccuccgacaaacacaucaaagaguaccugaacaaaauccaaaacucccucgcagccuacaucaagcccggauccgcaaacaaacccaaagacgaacucgacuacgccaacgacauagaaaaaaaaaucugcaaaauggaaaaaugcucagccgcauacgcaaaauucguagcagccuggacccuaaaagcggcagcauaaggacuagucccuguucccagagcccacuuuuuuuucuuuuuuugaaauaaaauagccugucuuucagaucuaaaaaaaaaaaaaaaaaaaaaaaaaaaaaaaaaaaaaaaaaaaaaaaaaaaaaaaaaaaaaaaaugcaucccccccccccccccccccccccccccccccaaaggcucuuuucagagccaccagaauu

SEQ ID NO: 8956 - RNA, 1359 nt, Artificial Sequence
  mRNA Design a-1 (A64-N5-C30-hSL-N5) comprising derived and/or modified sequence from Pf(3D7)__XP_001351122.1__HsALB_Pf-CSP(19-272)_L(AAY)_Pf-CSP(310-3 27)_L(AAY)_Pf-CSP(346-375)_L(AAY)_PADRE_L(AAY)_P2 (opt11)
aggagagucccgcagucggcguccagcggcucugcuuguucgugugugugucguugcaggccuuauucaagcuuaccaugaaaugggugaccuucauaucacuauuauuccucuucucaagcgcauacucacucuuccaagaauaccaaugcuacggcuccuccucaaacacgcgcguacucaacgaacuaaacuacgacaacgccggaacaaaccucuacaacgaacuagaaaugaacuacuacggcaaacaagaaaacugguacucccuaaaaaaaaacucaagaucccuaggcgagaaugacgacggcaacaacgaagacaacgaaaaacuccgcaaacccaaacacaaaaaacucaaacaacccgccgacggaaacccagacccaaacgccaacccaaacgucgacccaaacgcaaaccccaacguagaccccaacgcaaacccaaacguagacccaaacgcaaacccaaacgcaaacccaaacgcaaaccccaacgccaacccaaacgcaaacccaaacgccaauccaaacgcaaacccaaaugccaacccaaacgcaaacccaaacgcaaacccaaacgccaaccccaacgcaaacccaaacgcaaacccaaacgccaacccaaacgcaaacccaaacgcaaaccccaacgccaacccgaacguagaccccaacgcaaaccccaacgcaaacccaaacgccaauccaaacgcaaaccccaacgcaaaccccaacgcaaaccccaacgccaauccaaacgccaaccccaacgcgaacccgaacgcaaacccaaacgcaaacccaaacgcaaacccaaacgcaaacccaaacgcaaacccaaacgcaaacccgaacgcaaaccccaacgccaacccaaacgcaaacccagccgcauacgaacccucagacaaacacauaaaagaauaccuaaacaaaauccaaaacucacucgcugccuacaucaaaccaggaagcgcaaacaaacccaaagacgaacucgauuacgccaacgacaucgaaaaaaaaaucugcaaaauggaaaaaugcuccgccgccuacgcaaaauucgucgcagccuggacucuaaaagccgccgcagccgcauaccaauacauaaaagccaacucaaaauucaucggaaucaccgaacuguaaggacuagucccuguucccagagcccacuuuuuuuucuuuuuuugaaauaaaauagccugucuuucagaucuaaaaaaaaaaaaaaaaaaaaaaaaaaaaaaaaaaaaaaaaaaaaaaaaaaaaaaaaaaaaaaaaugcaucccccccccccccccccccccccccccccccaaaggcucuuuucagagccaccagaauu

SEQ ID NO: 8957 - RNA, 1323 nt, Artificial Sequence
  mRNA Design a-1 (A64-N5-C30-hSL-N5) comprising derived and/or modified sequence from Pf(3D7)__XP_001351122.1__HsALB_Pf-CSP(19-272)_L(AAY)_Pf-CSP(310-3 27)_Linker (AAY)_Pf-CSP(346-397) (opt11)
aggagagucccgcagucggcguccagcggcucugcuuguucgugugugugucguugcaggccuuauucaagcuuaccaugaaaugggucaccuucaucucacuccuguuccuauucucgagcgcauacucccucuuccaagaauaccagugcuacggcucaagcucaaacacacgcguacucaacgaacuaaacuacgacaacgccggaaccaaccucuacaacgaacuagaaaugaacuacuacggcaaacaagagaacugguacucucuaaagaaaaacagcagaucccugggcgagaacgacgacggaaacaacgaagacaacgagaaacuacgcaaacccaaacacaagaaacuaaaacaacccgcagauggaaacccagauccaaacgcaaacccaaacgucgacccuaacgcaaaccccaacguagaccccaacgcaaaccccaacguagacccaaacgccaacccaaacgccaacccaaacgccaacccgaacgcaaaccccaaugccaacccaaacgccaacccgaacgccaacccaaacgcgaaccccaacgccaacccaaacgcaaacccaaacgcaaacccuaacgcaaaccccaacgccaacccaaaugccaacccaaacgcaaacccaaacgcaaacccaaacgccaaccccaacguagacccaaacgcaaaccccaacgcaaacccaaacgcaaacccaaacgccaacccaaacgcaaacccaaacgcaaacccaaacgcaaacccgaacgccaaccccaacgcaaacccaaacgcaaacccaaacgccaacccaaacgccaacccaaacgcaaaccccaacgcaaaccccaacgccaaccccaacgccaacccaaacgcaaacccaaacgcaaacccagccgcauacgaacccucagacaaacacauaaaagaauaccucaauaaaauccaaaacucacuugcagccuacauaaaaccaggcagcgcgaacaaacccaaagacgaacucgacuacgcgaacgacauagaaaagaaaaucugcaaaauggaaaaaugcucauccgucuucaaugucguaaacucauccauaggccuaaucaugguccucuccuuccuauuccucaacuaaggacuagucccuguucccagagcccacuuuuuuuucuuuuuuugaaauaaaauagccugucuuucagaucuaaaaaaaaaaaaaaaaaaaaaaaaaaaaaaaaaaaaaaaaaaaaaaaaaaaaaaaaaaaaaaaaugcaucccccccccccccccccccccccccccccccaaaggcucuuuucagagccaccagaauu

SEQ ID NO: 8958 - RNA, 2020 nt, Artificial Sequence
  mRNA Design a-3 (A64-N5-C30-hSL-N5) comprising derived and/or modified sequence from Pf(3D7)__XP_001351122.1__LumSynt_L(GGS4-GGG)_Pf-CSP(19-397) (opt1)
aggagagggcgcuuggcuugcaaggacccugagcugcggcauugaagcacacccaacccaacucgacugaagucagccucacugaaccggaucugagaaucuucucucucugggcuugccagggcucuccgaaccuagcuagcauccucuucaauuccaacuagaaagcuuaccaugcagaucuacgagggcaagcugaccgccgaggggcuccgcuucggcaucguggccagccgguucaaccacgcgcuggucgaccgccugguggagggggccaucgacgccaucgugcggcacggcgggcgcgaggaggacaucacccucguccgggugcccggcuccugggagaucccgguggccgccggcgagcuggcccgcaaggaggacaucgacgcggucaucgccaucggggugcugauccggggcgccacgccccacuucgacuacaucgccagcgagguguccaaggggcucgcggaccugagccuggagcuccgcaagcccaucaccuucggcgucaucaccgccgacacccuggagcaggccaucgagcgggccgggacgaagcacggcaacaagggcugggaggccgcgcuguccgccaucgagauggccaaccucuucaagagccugcgcggcgggagcggcggguccggcgggagcggcggcuccgggggcgggcuguuccaggaguaccagugcuacggcuccagcuccaacacccgggugcucaacgagcugaacuacgacaacgcggggaccaaccuguacaacgagcucgagaugaacuacuacggcaagcaggagaacugguacagccugaagaagaacucccgcagccugggggagaacgacgacggcaacaacgaggacaacgagaagcuccggaagcccaagcacaagaagcugaagcagccggccgacgggaaccccgaccccaacgccaaccccaacguggacccgaacgccaaccccaacgucgaccccaacgccaaccccaacguggacccgaacgcgaaccccaacgccaaccccaacgccaaccccaacgccaacccgaacgcgaaccccaacgccaaccccaacgccaaccccaacgccaacccgaacgccaaccccaacgcgaaccccaacgccaaccccaacgccaacccgaacgccaaccccaacgccaaccccaacgcgaaccccaacgccaacccgaacgccaaccccaacguggaccccaacgccaaccccaacgccaacccgaacgcgaaccccaacgccaaccccaacgccaacccgaacgccaaccccaacgccaaccccaacgcgaaccccaacgccaacccgaacgccaaccccaacgccaaccccaacgcgaaccccaacgccaacccgaacgccaaccccaacgccaaccccaacgccaaccccaacgcgaacccgaacgccaaccccaacaagaacaaccagggcaacggccaggggcacaacaugcccaacgaccccaaccgcaacgucgacgagaacgccaacgccaacuccgccgugaagaacaacaacaacgaggagccgagcgacaagcacaucaaggaguaccugaacaagauccagaacucccucagcacggaguggucccccugcagcgugaccugcggcaacgggauccagguccggaucaagcccggcuccgcgaacaagcccaaggacgagcuggacuacgccaacgacaucgagaagaagaucugcaagauggagaagugcagcuccguguucaacguggucaacagcuccaucgggcugaucauggugcucagcuuccuguuccugaacugaggacuagucccuguucccagagcccacuuuuuuuucuuuuuuugaaauaaaauagccugucuuucagaucuaaaaaaaaaaaaaaaaaaaaaaaaaaaaaaaaaaaaaaaaaaaaaaaaaaaaaaaaaaaaaaaaugcaucccccccccccccccccccccccccccccccaaaggcucuuuucagagccaccagaauu

SEQ ID NO: 8959 - RNA, 1567 nt, Artificial Sequence
  mRNA Design a-3 (A64-N5-C30-hSL-N5) comprising derived and/or modified sequence from Pf(3D7)__XP_001351122.1__HsALB_Pf-CSP(19-397) (opt1)
aggagagggcgcuuggcuugcaaggacccugagcugcggcauugaagcacacccaacccaacucgacugaagucagccucacugaaccggaucugagaaucuucucucucugggcuugccagggcucuccgaaccuagcuagcauccucuucaauuccaacuagaaagcuuaccaugaagugggugaccuucaucagccuccuguuccuguucuccagcgccuacucccuguuccaggaguaccagugcuacggcuccagcuccaacacccgggugcucaacgagcugaacuacgacaacgcggggaccaaccuguacaacgagcucgagaugaacuacuacggcaagcaggagaacugguacagccugaagaagaacucccgcagccugggggagaacgacgacggcaacaacgaggacaacgagaagcuccggaagcccaagcacaagaagcugaagcagccggccgacgggaaccccgaccccaacgccaaccccaacguggacccgaacgccaaccccaacgucgaccccaacgccaaccccaacguggacccgaacgcgaaccccaacgccaaccccaacgccaaccccaacgccaacccgaacgcgaaccccaacgccaaccccaacgccaaccccaacgccaacccgaacgccaaccccaacgcgaaccccaacgccaaccccaacgccaacccgaacgccaaccccaacgccaaccccaacgcgaaccccaacgccaacccgaacgccaaccccaacguggaccccaacgccaaccccaacgccaacccgaacgcgaaccccaacgccaaccccaacgccaacccgaacgccaaccccaacgccaaccccaacgcgaaccccaacgccaacccgaacgccaaccccaacgccaaccccaacgcgaaccccaacgccaacccgaacgccaaccccaacgccaaccccaacgccaaccccaacgcgaacccgaacgccaaccccaacaagaacaaccagggcaacggccaggggcacaacaugcccaacgaccccaaccgcaacgucgacgagaacgccaacgccaacuccgccgugaagaacaacaacaacgaggagccgagcgacaagcacaucaaggaguaccugaacaagauccagaacucccucagcacggaguggucccccugcagcgugaccugcggcaacgggauccagguccggaucaagcccggcuccgcgaacaagcccaaggacgagcuggacuacgccaacgacaucgagaagaagaucugcaagauggagaagugcagcuccguguucaacguggucaacagcuccaucgggcugaucauggugcucagcuuccuguuccugaacugaggacuagucccuguucccagagcccacuuuuuuuucuuuuuuugaaauaaaauagccugucuuucagaucuaaaaaaaaaaaaaaaaaaaaaaaaaaaaaaaaaaaaaaaaaaaaaaaaaaaaaaaaaaaaaaaaugcaucccccccccccccccccccccccccccccccaaaggcucuuuucagagccaccagaauu

SEQ ID NO: 8960 - RNA, 1882 nt, Artificial Sequence
  mRNA Design a-3 (A64-N5-C30-hSL-N5) comprising derived and/or modified sequence from Pf(3D7)__XP_001351122.1__HsALB_Pf-CSP(19-272)_L(PVTN)_HBsAg (opt1)
aggagagggcgcuuggcuugcaaggacccugagcugcggcauugaagcacacccaacccaacucgacugaagucagccucacugaaccggaucugagaaucuucucucucugggcuugccagggcucuccgaaccuagcuagcauccucuucaauuccaacuagaaagcuuaccaugaagugggugaccuucaucagccugcucuuccuguucuccagcgccuacucccuguuccaggaguaccagugcuacggcuccagcuccaacacccgggugcucaacgagcugaacuacgacaacgcggggaccaaccuguacaacgagcucgagaugaacuacuacggcaagcaggagaacugguacagccugaagaagaacucccgcagccugggggagaacgacgacggcaacaacgaggacaacgagaagcuccggaagcccaagcacaagaagcugaagcagccggccgacgggaaccccgaccccaacgccaaccccaacguggacccgaacgccaaccccaacgucgaccccaacgccaaccccaacguggacccgaacgcgaaccccaacgccaaccccaacgccaaccccaacgccaacccgaacgcgaaccccaacgccaaccccaacgccaaccccaacgccaacccgaacgccaaccccaacgcgaaccccaacgccaaccccaacgccaacccgaacgccaaccccaacgccaaccccaacgcgaaccccaacgccaacccgaacgccaaccccaacguggaccccaacgccaaccccaacgccaacccgaacgcgaaccccaacgccaaccccaacgccaacccgaacgccaaccccaacgccaaccccaacgcgaaccccaacgccaacccgaacgccaaccccaacgccaaccccaacgcgaaccccaacgccaacccgaacgccaaccccaacgccaaccccaacgccaaccccaacgcgaacccgaacgccaaccccccggugacgaacauggagaacaucaccagcggcuuccuggggccccuccuggugcugcaggccggcuucuuccuccugacccgcauccugaccaucccgcagucccucgacagcugguggaccucccugaacuuccucgggggcagccccgucugccuggggcagaacucccagagccccaccuccaaccacagccccaccuccugcccgcccaucugccccggcuaccgguggaugugccugcgccgguucaucaucuuccuguucauccuccugcugugccucaucuuccugcuggugcuccuggacuaccagggcaugcugcccgugugcccgcucauccccgggagcacgaccaccaacaccggccccugcaagacgugcaccacccccgcccaggggaacuccauguucccgagcugcugcugcaccaagcccacggacggcaacugcacgugcauccccauccccuccagcugggcguucgccaaguaccugugggagugggccuccguccgcuucagcuggcugucccuccuggugccguucgugcagugguucgucgggcugagccccaccguguggcucuccgccaucuggaugaugugguacuggggccccagccuguacagcaucgugucccccuucaucccgcugcuccccaucuucuucugccugugggucuacaucugaggacuagucccuguucccagagcccacuuuuuuuucuuuuuuugaaauaaaauagccugucuuucagaucuaaaaaaaaaaaaaaaaaaaaaaaaaaaaaaaaaaaaaaaaaaaaaaaaaaaaaaaaaaaaaaaaugcaucccccccccccccccccccccccccccccccaaaggcucuuuucagagccaccagaauu

SEQ ID NO: 8961 - RNA, 1999 nt, Artificial Sequence
  mRNA Design a-3 (A64-N5-C30-hSL-N5) comprising derived and/or modified sequence from Pf(3D7)__XP_001351122.1__HsALB_Pf-CSP(19-272)_L(AAY)_Pf-CSP(346-3 65)_L(AAY)_PADRE_L(PVTN)_HBsAg (opt1)
aggagagggcgcuuggcuugcaaggacccugagcugcggcauugaagcacacccaacccaacucgacugaagucagccucacugaaccggaucugagaaucuucucucucugggcuugccagggcucuccgaaccuagcuagcauccucuucaauuccaacuagaaagcuuaccaugaagugggugaccuucaucagccugcucuuccuguucuccagcgccuacucccuguuccaggaguaccagugcuacggcuccagcuccaacacccgggugcucaacgagcugaacuacgacaacgcggggaccaaccuguacaacgagcucgagaugaacuacuacggcaagcaggagaacugguacagccugaagaagaacucccgcagccugggggagaacgacgacggcaacaacgaggacaacgagaagcuccggaagcccaagcacaagaagcugaagcagccggccgacgggaaccccgaccccaacgccaaccccaacguggacccgaacgccaaccccaacgucgaccccaacgccaaccccaacguggacccgaacgcgaaccccaacgccaaccccaacgccaaccccaacgccaacccgaacgcgaaccccaacgccaaccccaacgccaaccccaacgccaacccgaacgccaaccccaacgcgaaccccaacgccaaccccaacgccaacccgaacgccaaccccaacgccaaccccaacgcgaaccccaacgccaacccgaacgccaaccccaacguggaccccaacgccaaccccaacgccaacccgaacgcgaaccccaacgccaaccccaacgccaacccgaacgccaaccccaacgccaaccccaacgcgaaccccaacgccaacccgaacgccaaccccaacgccaaccccaacgcgaaccccaacgccaacccgaacgccaaccccaacgccaaccccaacgccaaccccaacgcgaacccgaacgccaaccccgccgcguauaucaagcccggcuccgcgaacaagcccaaggacgagcuggacuacgccaacgacaucgaggcggccuacgccaaguucguggccgccuggacccugaaggcggccgccccggugacgaacauggagaacaucaccagcggcuuccuggggccccuccuggugcugcaggccggcuucuuccuccugacccgcauccugaccaucccgcagucccucgacagcugguggaccucccugaacuuccucgggggcagccccgucugccuggggcagaacucccagagccccaccuccaaccacagccccaccuccugcccgcccaucugccccggcuaccgguggaugugccugcgccgguucaucaucuuccuguucauccuccugcugugccucaucuuccugcuggugcuccuggacuaccagggcaugcugcccgugugcccgcucauccccgggagcacgaccaccaacaccggccccugcaagacgugcaccacccccgcccaggggaacuccauguucccgagcugcugcugcaccaagcccacggacggcaacugcacgugcauccccauccccuccagcugggcguucgccaaguaccugugggagugggccuccguccgcuucagcuggcugucccuccuggugccguucgugcagugguucgucgggcugagccccaccguguggcucuccgccaucuggaugaugugguacuggggccccagccuguacagcaucgugucccccuucaucccgcugcuccccaucuucuucugccugugggucuacaucugaggacuagucccuguucccagagcccacuuuuuuuucuuuuuuugaaauaaaauagccugucuuucagaucuaaaaaaaaaaaaaaaaaaaaaaaaaaaaaaaaaaaaaaaaaaaaaaaaaaaaaaaaaaaaaaaaugcaucccccccccccccccccccccccccccccccaaaggcucuuuucagagccaccagaauu

SEQ ID NO: 8962 - RNA, 1999 nt, Artificial Sequence
  mRNA Design a-3 (A64-N5-C30-hSL-N5) comprising derived and/or modified sequence from Pf(3D7)__XP_001351122.1__HsALB_Pf-CSP(19-272)_L(AAY)_Pf-CSP(346-3 65)_L(AAY)_PADRE_L(PVTN)_HBsAg (opt1)
aggagagggcgcuuggcuugcaaggacccugagcugcggcauugaagcacacccaacccaacucgacugaagucagccucacugaaccggaucugagaaucuucucucucugggcuugccagggcucuccgaaccuagcuagcauccucuucaauuccaacuagaaagcuuaccaugaagugggugaccuucaucagccuccuguuccuguucuccagcgccuacucccuguuccaggaguaccagugcuacggcuccagcuccaacacccgggugcucaacgagcugaacuacgacaacgcggggaccaaccuguacaacgagcucgagaugaacuacuacggcaagcaggagaacugguacagccugaagaagaacucccgcagccugggggagaacgacgacggcaacaacgaggacaacgagaagcuccggaagcccaagcacaagaagcugaagcagccggccgacgggaaccccgaccccaacgccaaccccaacguggacccgaacgccaaccccaacgucgaccccaacgccaaccccaacguggacccgaacgcgaaccccaacgccaaccccaacgccaaccccaacgccaacccgaacgcgaaccccaacgccaaccccaacgccaaccccaacgccaacccgaacgccaaccccaacgcgaaccccaacgccaaccccaacgccaacccgaacgccaaccccaacgccaaccccaacgcgaaccccaacgccaacccgaacgccaaccccaacguggaccccaacgccaaccccaacgccaacccgaacgcgaaccccaacgccaaccccaacgccaacccgaacgccaaccccaacgccaaccccaacgcgaaccccaacgccaacccgaacgccaaccccaacgccaaccccaacgcgaaccccaacgccaacccgaacgccaaccccaacgccaaccccaacgccaaccccaacgcgaacccgaacgccaaccccgccgcguauaucaagcccggcuccgcgaacaagcccaaggacgagcuggacuacgccaacgacaucgaggcggccuacgccaaguucguggccgccuggacccugaaggcggccgccccggugacgaacauggagaacaucaccagcggcuuccuggggccccuccuggugcugcaggccggcuucuuccuccugacccgcauccugaccaucccgcagucccucgacagcugguggaccucccugaacuuccucgggggcagccccgucugccuggggcagaacucccagagccccaccuccaaccacagccccaccuccugcccgcccaucugccccggcuaccgguggaugugccugcgccgguucaucaucuuccuguucauccuccugcugugccucaucuuccugcuggugcuccuggacuaccagggcaugcugcccgugugcccgcucauccccgggagcacgaccaccaacaccggccccugcaagacgugcaccacccccgcccaggggaacuccauguucccgagcugcugcugcaccaagcccacggacggcaacugcacgugcauccccauccccuccagcugggcguucgccaaguaccugugggagugggccuccguccgcuucagcuggcugucccuccuggugccguucgugcagugguucgucgggcugagccccaccguguggcucuccgccaucuggaugaugugguacuggggccccagccuguacagcaucgugucccccuucaucccgcugcuccccaucuucuucugccugugggucuacaucugaggacuagucccuguucccagagcccacuuuuuuuucuuuuuuugaaauaaaauagccugucuuucagaucuaaaaaaaaaaaaaaaaaaaaaaaaaaaaaaaaaaaaaaaaaaaaaaaaaaaaaaaaaaaaaaaaugcaucccccccccccccccccccccccccccccccaaaggcucuuuucagagccaccagaauu

SEQ ID NO: 8963 - RNA, 2218 nt, Artificial Sequence
  mRNA Design a-3 (A64-N5-C30-hSL-N5) comprising derived and/or modified sequence from Pf(3D7)__XP_001351122.1__HsALB_Pf-CSP(19-384)_L(PVTN)_HBsAg (opt1)
aggagagggcgcuuggcuugcaaggacccugagcugcggcauugaagcacacccaacccaacucgacugaagucagccucacugaaccggaucugagaaucuucucucucugggcuugccagggcucuccgaaccuagcuagcauccucuucaauuccaacuagaaagcuuaccaugaagugggugaccuucaucagccugcucuuccuguucuccagcgccuacucccuguuccaggaguaccagugcuacggcuccagcuccaacacccgggugcucaacgagcugaacuacgacaacgcggggaccaaccuguacaacgagcucgagaugaacuacuacggcaagcaggagaacugguacagccugaagaagaacucccgcagccugggggagaacgacgacggcaacaacgaggacaacgagaagcuccggaagcccaagcacaagaagcugaagcagccggccgacgggaaccccgaccccaacgccaaccccaacguggacccgaacgccaaccccaacgucgaccccaacgccaaccccaacguggacccgaacgcgaaccccaacgccaaccccaacgccaaccccaacgccaacccgaacgcgaaccccaacgccaaccccaacgccaaccccaacgccaacccgaacgccaaccccaacgcgaaccccaacgccaaccccaacgccaacccgaacgccaaccccaacgccaaccccaacgcgaaccccaacgccaacccgaacgccaaccccaacguggaccccaacgccaaccccaacgccaacccgaacgcgaaccccaacgccaaccccaacgccaacccgaacgccaaccccaacgccaaccccaacgcgaaccccaacgccaacccgaacgccaaccccaacgccaaccccaacgcgaaccccaacgccaacccgaacgccaaccccaacgccaaccccaacgccaaccccaacgcgaacccgaacgccaaccccaacaagaacaaccagggcaacggccaggggcacaacaugcccaacgaccccaaccgcaacgucgacgagaacgccaacgccaacuccgccgugaagaacaacaacaacgaggagccgagcgacaagcacaucaaggaguaccugaacaagauccagaacucccucagcacggaguggucccccugcagcgugaccugcggcaacgggauccagguccggaucaagcccggcuccgcgaacaagcccaaggacgagcuggacuacgccaacgacaucgagaagaagaucugcaagauggagaagugcagcuccguguucaacguggucaacagcuccccggugacgaacauggagaacaucaccagcggcuuccuggggccccuccuggugcugcaggccggcuucuuccuccugacccgcauccugaccaucccgcagucccucgacagcugguggaccucccugaacuuccucgggggcagccccgucugccuggggcagaacucccagagccccaccuccaaccacagccccaccuccugcccgcccaucugccccggcuaccgguggaugugccugcgccgguucaucaucuuccuguucauccuccugcugugccucaucuuccugcuggugcuccuggacuaccagggcaugcugcccgugugcccgcucauccccgggagcacgaccaccaacaccggccccugcaagacgugcaccacccccgcccaggggaacuccauguucccgagcugcugcugcaccaagcccacggacggcaacugcacgugcauccccauccccuccagcugggcguucgccaaguaccugugggagugggccuccguccgcuucagcuggcugucccuccuggugccguucgugcagugguucgucgggcugagccccaccguguggcucuccgccaucuggaugaugugguacuggggccccagccuguacagcaucgugucccccuucaucccgcugcuccccaucuucuucugccugugggucuacaucugaggacuagucccuguucccagagcccacuuuuuuuucuuuuuuugaaauaaaauagccugucuuucagaucuaaaaaaaaaaaaaaaaaaaaaaaaaaaaaaaaaaaaaaaaaaaaaaaaaaaaaaaaaaaaaaaaugcaucccccccccccccccccccccccccccccccaaaggcucuuuucagagccaccagaauu

SEQ ID NO: 8964 - RNA, 2218 nt, Artificial Sequence
  mRNA Design a-3 (A64-N5-C30-hSL-N5) comprising derived and/or modified sequence from Pf(3D7)__XP_001351122.1__HsALB_Pf-CSP(19-384)_L(PVTN)_HBsAg (opt1)
aggagagggcgcuuggcuugcaaggacccugagcugcggcauugaagcacacccaacccaacucgacugaagucagccucacugaaccggaucugagaaucuucucucucugggcuugccagggcucuccgaaccuagcuagcauccucuucaauuccaacuagaaagcuuaccaugaagugggugaccuucaucagccuccuguuccuguucuccagcgccuacucccuguuccaggaguaccagugcuacggcuccagcuccaacacccgggugcucaacgagcugaacuacgacaacgcggggaccaaccuguacaacgagcucgagaugaacuacuacggcaagcaggagaacugguacagccugaagaagaacucccgcagccugggggagaacgacgacggcaacaacgaggacaacgagaagcuccggaagcccaagcacaagaagcugaagcagccggccgacgggaaccccgaccccaacgccaaccccaacguggacccgaacgccaaccccaacgucgaccccaacgccaaccccaacguggacccgaacgcgaaccccaacgccaaccccaacgccaaccccaacgccaacccgaacgcgaaccccaacgccaaccccaacgccaaccccaacgccaacccgaacgccaaccccaacgcgaaccccaacgccaaccccaacgccaacccgaacgccaaccccaacgccaaccccaacgcgaaccccaacgccaacccgaacgccaaccccaacguggaccccaacgccaaccccaacgccaacccgaacgcgaaccccaacgccaaccccaacgccaacccgaacgccaaccccaacgccaaccccaacgcgaaccccaacgccaacccgaacgccaaccccaacgccaaccccaacgcgaaccccaacgccaacccgaacgccaaccccaacgccaaccccaacgccaaccccaacgcgaacccgaacgccaaccccaacaagaacaaccagggcaacggccaggggcacaacaugcccaacgaccccaaccgcaacgucgacgagaacgccaacgccaacuccgccgugaagaacaacaacaacgaggagccgagcgacaagcacaucaaggaguaccugaacaagauccagaacucccucagcacggaguggucccccugcagcgugaccugcggcaacgggauccagguccggaucaagcccggcuccgcgaacaagcccaaggacgagcuggacuacgccaacgacaucgagaagaagaucugcaagauggagaagugcagcuccguguucaacguggucaacagcuccccggugacgaacauggagaacaucaccagcggcuuccuggggccccuccuggugcugcaggccggcuucuuccuccugacccgcauccugaccaucccgcagucccucgacagcugguggaccucccugaacuuccucgggggcagccccgucugccuggggcagaacucccagagccccaccuccaaccacagccccaccuccugcccgcccaucugccccggcuaccgguggaugugccugcgccgguucaucaucuuccuguucauccuccugcugugccucaucuuccugcuggugcuccuggacuaccagggcaugcugcccgugugcccgcucauccccgggagcacgaccaccaacaccggccccugcaagacgugcaccacccccgcccaggggaacuccauguucccgagcugcugcugcaccaagcccacggacggcaacugcacgugcauccccauccccuccagcugggcguucgccaaguaccugugggagugggccuccguccgcuucagcuggcugucccuccuggugccguucgugcagugguucgucgggcugagccccaccguguggcucuccgccaucuggaugaugugguacuggggccccagccuguacagcaucgugucccccuucaucccgcugcuccccaucuucuucugccugugggucuacaucugaggacuagucccuguucccagagcccacuuuuuuuucuuuuuuugaaauaaaauagccugucuuucagaucuaaaaaaaaaaaaaaaaaaaaaaaaaaaaaaaaaaaaaaaaaaaaaaaaaaaaaaaaaaaaaaaaugcaucccccccccccccccccccccccccccccccaaaggcucuuuucagagccaccagaauu

SEQ ID NO: 8965 - RNA, 2035 nt, Artificial Sequence
  mRNA Design a-3 (A64-N5-C30-hSL-N5) comprising derived and/or modified sequence from Pf(3D7)__XP_001351122.1__HsALB_Pf-CSP(19-384)_L(SGG)_Ferritin (opt1)
aggagagggcgcuuggcuugcaaggacccugagcugcggcauugaagcacacccaacccaacucgacugaagucagccucacugaaccggaucugagaaucuucucucucugggcuugccagggcucuccgaaccuagcuagcauccucuucaauuccaacuagaaagcuuaccaugaagugggugaccuucaucagccugcucuuccuguucuccagcgccuacucccuguuccaggaguaccagugcuacggcuccagcuccaacacccgggugcucaacgagcugaacuacgacaacgcggggaccaaccuguacaacgagcucgagaugaacuacuacggcaagcaggagaacugguacagccugaagaagaacucccgcagccugggggagaacgacgacggcaacaacgaggacaacgagaagcuccggaagcccaagcacaagaagcugaagcagccggccgacgggaaccccgaccccaacgccaaccccaacguggacccgaacgccaaccccaacgucgaccccaacgccaaccccaacguggacccgaacgcgaaccccaacgccaaccccaacgccaaccccaacgccaacccgaacgcgaaccccaacgccaaccccaacgccaaccccaacgccaacccgaacgccaaccccaacgcgaaccccaacgccaaccccaacgccaacccgaacgccaaccccaacgccaaccccaacgcgaaccccaacgccaacccgaacgccaaccccaacguggaccccaacgccaaccccaacgccaacccgaacgcgaaccccaacgccaaccccaacgccaacccgaacgccaaccccaacgccaaccccaacgcgaaccccaacgccaacccgaacgccaaccccaacgccaaccccaacgcgaaccccaacgccaacccgaacgccaaccccaacgccaaccccaacgccaaccccaacgcgaacccgaacgccaaccccaacaagaacaaccagggcaacggccaggggcacaacaugcccaacgaccccaaccgcaacgucgacgagaacgccaacgccaacuccgccgugaagaacaacaacaacgaggagccgagcgacaagcacaucaaggaguaccugaacaagauccagaacucccucagcacggaguggucccccugcagcgugaccugcggcaacgggauccagguccggaucaagcccggcuccgcgaacaagcccaaggacgagcuggacuacgccaacgacaucgagaagaagaucugcaagauggagaagugcagcuccguguucaacguggucaacagcuccagcggcgggcugagcaaggacaucaucaagcuccugaacgagcaggugaacaaggagaugaacuccagcaaccuguacauguccaugagcuccuggugcuacacccacagccucgacggcgccgggcuguuccuguucgaccacgccgcggaggaguacgagcacgccaagaagcucaucaucuuccugaacgagaacaacguccccgugcagcugaccuccaucagcgccccggagcacaaguucgagggccucacgcagaucuuccagaaggccuacgagcacgagcagcacaucuccgagagcaucaacaacaucguggaccacgccaucaaguccaaggaccacgcgaccuucaacuuccugcagugguacgucgccgagcagcacgaggaggaggugcuguucaaggacauccucgacaagaucgagcugaucgggaacgagaaccacggccuguaccucgccgaccaguacgugaaggggaucgccaagagccgcaaguccugaggacuagucccuguucccagagcccacuuuuuuuucuuuuuuugaaauaaaauagccugucuuucagaucuaaaaaaaaaaaaaaaaaaaaaaaaaaaaaaaaaaaaaaaaaaaaaaaaaaaaaaaaaaaaaaaaugcaucccccccccccccccccccccccccccccccaaaggcucuuuucagagccaccagaauu

SEQ ID NO: 8966 - RNA, 2035 nt, Artificial Sequence
  mRNA Design a-3 (A64-N5-C30-hSL-N5) comprising derived and/or modified sequence from Pf(3D7)__XP_001351122.1__HsALB_Pf-CSP(19-384)_L(SGG)_Ferritin (opt1)
aggagagggcgcuuggcuugcaaggacccugagcugcggcauugaagcacacccaacccaacucgacugaagucagccucacugaaccggaucugagaaucuucucucucugggcuugccagggcucuccgaaccuagcuagcauccucuucaauuccaacuagaaagcuuaccaugaagugggugaccuucaucagccuccuguuccuguucuccagcgccuacucccuguuccaggaguaccagugcuacggcuccagcuccaacacccgggugcucaacgagcugaacuacgacaacgcggggaccaaccuguacaacgagcucgagaugaacuacuacggcaagcaggagaacugguacagccugaagaagaacucccgcagccugggggagaacgacgacggcaacaacgaggacaacgagaagcuccggaagcccaagcacaagaagcugaagcagccggccgacgggaaccccgaccccaacgccaaccccaacguggacccgaacgccaaccccaacgucgaccccaacgccaaccccaacguggacccgaacgcgaaccccaacgccaaccccaacgccaaccccaacgccaacccgaacgcgaaccccaacgccaaccccaacgccaaccccaacgccaacccgaacgccaaccccaacgcgaaccccaacgccaaccccaacgccaacccgaacgccaaccccaacgccaaccccaacgcgaaccccaacgccaacccgaacgccaaccccaacguggaccccaacgccaaccccaacgccaacccgaacgcgaaccccaacgccaaccccaacgccaacccgaacgccaaccccaacgccaaccccaacgcgaaccccaacgccaacccgaacgccaaccccaacgccaaccccaacgcgaaccccaacgccaacccgaacgccaaccccaacgccaaccccaacgccaaccccaacgcgaacccgaacgccaaccccaacaagaacaaccagggcaacggccaggggcacaacaugcccaacgaccccaaccgcaacgucgacgagaacgccaacgccaacuccgccgugaagaacaacaacaacgaggagccgagcgacaagcacaucaaggaguaccugaacaagauccagaacucccucagcacggaguggucccccugcagcgugaccugcggcaacgggauccagguccggaucaagcccggcuccgcgaacaagcccaaggacgagcuggacuacgccaacgacaucgagaagaagaucugcaagauggagaagugcagcuccguguucaacguggucaacagcuccagcggcgggcugagcaaggacaucaucaagcuccugaacgagcaggugaacaaggagaugaacuccagcaaccuguacauguccaugagcuccuggugcuacacccacagccucgacggcgccgggcuguuccuguucgaccacgccgcggaggaguacgagcacgccaagaagcucaucaucuuccugaacgagaacaacguccccgugcagcugaccuccaucagcgccccggagcacaaguucgagggccucacgcagaucuuccagaaggccuacgagcacgagcagcacaucuccgagagcaucaacaacaucguggaccacgccaucaaguccaaggaccacgcgaccuucaacuuccugcagugguacgucgccgagcagcacgaggaggaggugcuguucaaggacauccucgacaagaucgagcugaucgggaacgagaaccacggccuguaccucgccgaccaguacgugaaggggaucgccaagagccgcaaguccugaggacuagucccuguucccagagcccacuuuuuuuucuuuuuuugaaauaaaauagccugucuuucagaucuaaaaaaaaaaaaaaaaaaaaaaaaaaaaaaaaaaaaaaaaaaaaaaaaaaaaaaaaaaaaaaaaugcaucccccccccccccccccccccccccccccccaaaggcucuuuucagagccaccagaauu

SEQ ID NO: 8967 - RNA, 1996 nt, Artificial Sequence
  mRNA Design a-3 (A64-N5-C30-hSL-N5) comprising derived and/or modified sequence from Pf(3D7)__XP_001351122.1__HsALB_Pf-CSP(93-384)_L(PVTN)_HBsAg (opt1)
aggagagggcgcuuggcuugcaaggacccugagcugcggcauugaagcacacccaacccaacucgacugaagucagccucacugaaccggaucugagaaucuucucucucugggcuugccagggcucuccgaaccuagcuagcauccucuucaauuccaacuagaaagcuuaccaugaagugggugaccuucaucagccugcucuuccuguucuccagcgccuacuccaagcugaagcagccggccgacgggaaccccgaccccaacgccaaccccaacguggacccgaacgccaaccccaacgucgaccccaacgccaaccccaacguggacccgaacgcgaaccccaacgccaaccccaacgccaaccccaacgccaacccgaacgcgaaccccaacgccaaccccaacgccaaccccaacgccaacccgaacgccaaccccaacgcgaaccccaacgccaaccccaacgccaacccgaacgccaaccccaacgccaaccccaacgcgaaccccaacgccaacccgaacgccaaccccaacguggaccccaacgccaaccccaacgccaacccgaacgcgaaccccaacgccaaccccaacgccaacccgaacgccaaccccaacgccaaccccaacgcgaaccccaacgccaacccgaacgccaaccccaacgccaaccccaacgcgaaccccaacgccaacccgaacgccaaccccaacgccaaccccaacgccaaccccaacgcgaacccgaacgccaaccccaacaagaacaaccagggcaacggccaggggcacaacaugcccaacgaccccaaccgcaacgucgacgagaacgccaacgccaacuccgccgugaagaacaacaacaacgaggagccgagcgacaagcacaucaaggaguaccugaacaagauccagaacucccucagcacggaguggucccccugcagcgugaccugcggcaacgggauccagguccggaucaagcccggcuccgcgaacaagcccaaggacgagcuggacuacgccaacgacaucgagaagaagaucugcaagauggagaagugcagcuccguguucaacguggucaacagcuccccggugacgaacauggagaacaucaccagcggcuuccuggggccccuccuggugcugcaggccggcuucuuccuccugacccgcauccugaccaucccgcagucccucgacagcugguggaccucccugaacuuccucgggggcagccccgucugccuggggcagaacucccagagccccaccuccaaccacagccccaccuccugcccgcccaucugccccggcuaccgguggaugugccugcgccgguucaucaucuuccuguucauccuccugcugugccucaucuuccugcuggugcuccuggacuaccagggcaugcugcccgugugcccgcucauccccgggagcacgaccaccaacaccggccccugcaagacgugcaccacccccgcccaggggaacuccauguucccgagcugcugcugcaccaagcccacggacggcaacugcacgugcauccccauccccuccagcugggcguucgccaaguaccugugggagugggccuccguccgcuucagcuggcugucccuccuggugccguucgugcagugguucgucgggcugagccccaccguguggcucuccgccaucuggaugaugugguacuggggccccagccuguacagcaucgugucccccuucaucccgcugcuccccaucuucuucugccugugggucuacaucugaggacuagucccuguucccagagcccacuuuuuuuucuuuuuuugaaauaaaauagccugucuuucagaucuaaaaaaaaaaaaaaaaaaaaaaaaaaaaaaaaaaaaaaaaaaaaaaaaaaaaaaaaaaaaaaaaugcaucccccccccccccccccccccccccccccccaaaggcucuuuucagagccaccagaauu

SEQ ID NO: 8968 - RNA, 1996 nt, Artificial Sequence
  mRNA Design a-3 (A64-N5-C30-hSL-N5) comprising derived and/or modified sequence from Pf(3D7)__XP_001351122.1__HsALB_Pf-CSP(93-384)_L(PVTN)_HBsAg (opt1)
aggagagggcgcuuggcuugcaaggacccugagcugcggcauugaagcacacccaacccaacucgacugaagucagccucacugaaccggaucugagaaucuucucucucugggcuugccagggcucuccgaaccuagcuagcauccucuucaauuccaacuagaaagcuuaccaugaagugggugaccuucaucagccuccuguuccuguucuccagcgccuacuccaagcugaagcagccggccgacgggaaccccgaccccaacgccaaccccaacguggacccgaacgccaaccccaacgucgaccccaacgccaaccccaacguggacccgaacgcgaaccccaacgccaaccccaacgccaaccccaacgccaacccgaacgcgaaccccaacgccaaccccaacgccaaccccaacgccaacccgaacgccaaccccaacgcgaaccccaacgccaaccccaacgccaacccgaacgccaaccccaacgccaaccccaacgcgaaccccaacgccaacccgaacgccaaccccaacguggaccccaacgccaaccccaacgccaacccgaacgcgaaccccaacgccaaccccaacgccaacccgaacgccaaccccaacgccaaccccaacgcgaaccccaacgccaacccgaacgccaaccccaacgccaaccccaacgcgaaccccaacgccaacccgaacgccaaccccaacgccaaccccaacgccaaccccaacgcgaacccgaacgccaaccccaacaagaacaaccagggcaacggccaggggcacaacaugcccaacgaccccaaccgcaacgucgacgagaacgccaacgccaacuccgccgugaagaacaacaacaacgaggagccgagcgacaagcacaucaaggaguaccugaacaagauccagaacucccucagcacggaguggucccccugcagcgugaccugcggcaacgggauccagguccggaucaagcccggcuccgcgaacaagcccaaggacgagcuggacuacgccaacgacaucgagaagaagaucugcaagauggagaagugcagcuccguguucaacguggucaacagcuccccggugacgaacauggagaacaucaccagcggcuuccuggggccccuccuggugcugcaggccggcuucuuccuccugacccgcauccugaccaucccgcagucccucgacagcugguggaccucccugaacuuccucgggggcagccccgucugccuggggcagaacucccagagccccaccuccaaccacagccccaccuccugcccgcccaucugccccggcuaccgguggaugugccugcgccgguucaucaucuuccuguucauccuccugcugugccucaucuuccugcuggugcuccuggacuaccagggcaugcugcccgugugcccgcucauccccgggagcacgaccaccaacaccggccccugcaagacgugcaccacccccgcccaggggaacuccauguucccgagcugcugcugcaccaagcccacggacggcaacugcacgugcauccccauccccuccagcugggcguucgccaaguaccugugggagugggccuccguccgcuucagcuggcugucccuccuggugccguucgugcagugguucgucgggcugagccccaccguguggcucuccgccaucuggaugaugugguacuggggccccagccuguacagcaucgugucccccuucaucccgcugcuccccaucuucuucugccugugggucuacaucugaggacuagucccuguucccagagcccacuuuuuuuucuuuuuuugaaauaaaauagccugucuuucagaucuaaaaaaaaaaaaaaaaaaaaaaaaaaaaaaaaaaaaaaaaaaaaaaaaaaaaaaaaaaaaaaaaugcaucccccccccccccccccccccccccccccccaaaggcucuuuucagagccaccagaauu

SEQ ID NO: 8969 - RNA, 1657 nt, Artificial Sequence; identical to SEQ ID NO: 6344
  mRNA Design a-3 (A64-N5-C30-hSL-N5) comprising derived and/or modified sequence from Pf(3D7)__XP_001351122.1__HsALB_Pf-CSP(199-377)_L(PVTN)_HBsAg (opt1)

SEQ ID NO: 8970 - RNA, 1354 nt, Artificial Sequence
  mRNA Design a-3 (A64-N5-C30-hSL-N5) comprising derived and/or modified sequence from Pf(3D7)__XP_001351122.1__HsALB_Pf-CSP(19-272)_L(AAY)_Pf-CSP(310-3 27)_L(AAY)_Pf-CSP(346-375) (opt1)
aggagagggcgcuuggcuugcaaggacccugagcugcggcauugaagcacacccaacccaacucgacugaagucagccucacugaaccggaucugagaaucuucucucucugggcuugccagggcucuccgaaccuagcuagcauccucuucaauuccaacuagaaagcuuaccaugaagugggugaccuucaucagccuccuguuccuguucuccagcgccuacucccuguuccaggaguaccagugcuacggcuccagcuccaacacccgggugcucaacgagcugaacuacgacaacgcggggaccaaccuguacaacgagcucgagaugaacuacuacggcaagcaggagaacugguacagccugaagaagaacucccgcagccugggggagaacgacgacggcaacaacgaggacaacgagaagcuccggaagcccaagcacaagaagcugaagcagccggccgacgggaaccccgaccccaacgccaaccccaacguggacccgaacgccaaccccaacgucgaccccaacgccaaccccaacguggacccgaacgcgaaccccaacgccaaccccaacgccaaccccaacgccaacccgaacgcgaaccccaacgccaaccccaacgccaaccccaacgccaacccgaacgccaaccccaacgcgaaccccaacgccaaccccaacgccaacccgaacgccaaccccaacgccaaccccaacgcgaaccccaacgccaacccgaacgccaaccccaacguggaccccaacgccaaccccaacgccaacccgaacgcgaaccccaacgccaaccccaacgccaacccgaacgccaaccccaacgccaaccccaacgcgaaccccaacgccaacccgaacgccaaccccaacgccaaccccaacgcgaaccccaacgccaacccgaacgccaaccccaacgccaaccccaacgccaaccccaacgcgaacccgaacgccaaccccgccgcguaugagccgagcgacaagcacaucaaggaguaccugaacaagauccagaacucccucgcggccuacaucaagcccggcuccgcgaacaagcccaaggacgagcuggacuacgccaacgacaucgagaagaagaucugcaagauggagaagugcagcugaggacuagucccuguucccagagcccacuuuuuuuucuuuuuuugaaauaaaauagccugucuuucagaucuaaaaaaaaaaaaaaaaaaaaaaaaaaaaaaaaaaaaaaaaaaaaaaaaaaaaaaaaaaaaaaaaugcaucccccccccccccccccccccccccccccccaaaggcucuuuucagagccaccagaauu

SEQ ID NO: 8971 - RNA, 1354 nt, Artificial Sequence
  mRNA Design a-3 (A64-N5-C30-hSL-N5) comprising derived and/or modified sequence from Pf(3D7)__XP_001351122.1__HsALB_Pf-CSP(19-272)_L(AAY)_Pf-CSP(346-3 75)_L(AAY)_Pf-CSP(310-327) (opt1)
aggagagggcgcuuggcuugcaaggacccugagcugcggcauugaagcacacccaacccaacucgacugaagucagccucacugaaccggaucugagaaucuucucucucugggcuugccagggcucuccgaaccuagcuagcauccucuucaauuccaacuagaaagcuuaccaugaagugggugaccuucaucagccuccuguuccuguucuccagcgccuacucccuguuccaggaguaccagugcuacggcuccagcuccaacacccgggugcucaacgagcugaacuacgacaacgcggggaccaaccuguacaacgagcucgagaugaacuacuacggcaagcaggagaacugguacagccugaagaagaacucccgcagccugggggagaacgacgacggcaacaacgaggacaacgagaagcuccggaagcccaagcacaagaagcugaagcagccggccgacgggaaccccgaccccaacgccaaccccaacguggacccgaacgccaaccccaacgucgaccccaacgccaaccccaacguggacccgaacgcgaaccccaacgccaaccccaacgccaaccccaacgccaacccgaacgcgaaccccaacgccaaccccaacgccaaccccaacgccaacccgaacgccaaccccaacgcgaaccccaacgccaaccccaacgccaacccgaacgccaaccccaacgccaaccccaacgcgaaccccaacgccaacccgaacgccaaccccaacguggaccccaacgccaaccccaacgccaacccgaacgcgaaccccaacgccaaccccaacgccaacccgaacgccaaccccaacgccaaccccaacgcgaaccccaacgccaacccgaacgccaaccccaacgccaaccccaacgcgaaccccaacgccaacccgaacgccaaccccaacgccaaccccaacgccaaccccaacgcgaacccgaacgccaaccccgcggccuacaucaagcccggcuccgcgaacaagcccaaggacgagcuggacuacgccaacgacaucgagaagaagaucugcaagauggagaagugcagcgccgcguaugagccgagcgacaagcacaucaaggaguaccugaacaagauccagaacucccucugaggacuagucccuguucccagagcccacuuuuuuuucuuuuuuugaaauaaaauagccugucuuucagaucuaaaaaaaaaaaaaaaaaaaaaaaaaaaaaaaaaaaaaaaaaaaaaaaaaaaaaaaaaaaaaaaaugcaucccccccccccccccccccccccccccccccaaaggcucuuuucagagccaccagaauu

SEQ ID NO: 8972 - RNA, 1402 nt, Artificial Sequence
  mRNA Design a-3 (A64-N5-C30-hSL-N5) comprising derived and/or modified sequence from Pf(3D7)__XP_001351122.1__HsALB_Pf-CSP(19-272)_L(AAY)_Pf-CSP(346-3 75)_L(AAY)_Pf-CSP(310-327)_L(AAY)_PADRE (opt1)
aggagagggcgcuuggcuugcaaggacccugagcugcggcauugaagcacacccaacccaacucgacugaagucagccucacugaaccggaucugagaaucuucucucucugggcuugccagggcucuccgaaccuagcuagcauccucuucaauuccaacuagaaagcuuaccaugaagugggugaccuucaucagccuccuguuccuguucuccagcgccuacucccuguuccaggaguaccagugcuacggcuccagcuccaacacccgggugcucaacgagcugaacuacgacaacgcggggaccaaccuguacaacgagcucgagaugaacuacuacggcaagcaggagaacugguacagccugaagaagaacucccgcagccugggggagaacgacgacggcaacaacgaggacaacgagaagcuccggaagcccaagcacaagaagcugaagcagccggccgacgggaaccccgaccccaacgccaaccccaacguggacccgaacgccaaccccaacgucgaccccaacgccaaccccaacguggacccgaacgcgaaccccaacgccaaccccaacgccaaccccaacgccaacccgaacgcgaaccccaacgccaaccccaacgccaaccccaacgccaacccgaacgccaaccccaacgcgaaccccaacgccaaccccaacgccaacccgaacgccaaccccaacgccaaccccaacgcgaaccccaacgccaacccgaacgccaaccccaacguggaccccaacgccaaccccaacgccaacccgaacgcgaaccccaacgccaaccccaacgccaacccgaacgccaaccccaacgccaaccccaacgcgaaccccaacgccaacccgaacgccaaccccaacgccaaccccaacgcgaaccccaacgccaacccgaacgccaaccccaacgccaaccccaacgccaaccccaacgcgaacccgaacgccaaccccgccgcguauaucaagcccggcuccgcgaacaagcccaaggacgagcuggacuacgccaacgacaucgagaagaagaucugcaagauggagaagugcagcgcggccuacgagccgagcgacaagcacaucaaggaguaccugaacaagauccagaacucccucgccgccuacgccaaguucguggccgccuggacccugaaggcggccgccugaggacuagucccuguucccagagcccacuuuuuuuucuuuuuuugaaauaaaauagccugucuuucagaucuaaaaaaaaaaaaaaaaaaaaaaaaaaaaaaaaaaaaaaaaaaaaaaaaaaaaaaaaaaaaaaaaugcaucccccccccccccccccccccccccccccccaaaggcucuuuucagagccaccagaauu

SEQ ID NO: 8973 - RNA, 1402 nt, Artificial Sequence
  mRNA Design a-3 (A64-N5-C30-hSL-N5) comprising derived and/or modified sequence from Pf(3D7)__XP_001351122.1__HsALB_Pf-CSP(19-272)_L(AAY)_Pf-CSP(310-3 27)_L(AAY)_Pf-CSP(346-375)_L(AAY)_PADRE (opt1)
aggagagggcgcuuggcuugcaaggacccugagcugcggcauugaagcacacccaacccaacucgacugaagucagccucacugaaccggaucugagaaucuucucucucugggcuugccagggcucuccgaaccuagcuagcauccucuucaauuccaacuagaaagcuuaccaugaagugggugaccuucaucagccuccuguuccuguucuccagcgccuacucccuguuccaggaguaccagugcuacggcuccagcuccaacacccgggugcucaacgagcugaacuacgacaacgcggggaccaaccuguacaacgagcucgagaugaacuacuacggcaagcaggagaacugguacagccugaagaagaacucccgcagccugggggagaacgacgacggcaacaacgaggacaacgagaagcuccggaagcccaagcacaagaagcugaagcagccggccgacgggaaccccgaccccaacgccaaccccaacguggacccgaacgccaaccccaacgucgaccccaacgccaaccccaacguggacccgaacgcgaaccccaacgccaaccccaacgccaaccccaacgccaacccgaacgcgaaccccaacgccaaccccaacgccaaccccaacgccaacccgaacgccaaccccaacgcgaaccccaacgccaaccccaacgccaacccgaacgccaaccccaacgccaaccccaacgcgaaccccaacgccaacccgaacgccaaccccaacguggaccccaacgccaaccccaacgccaacccgaacgcgaaccccaacgccaaccccaacgccaacccgaacgccaaccccaacgccaaccccaacgcgaaccccaacgccaacccgaacgccaaccccaacgccaaccccaacgcgaaccccaacgccaacccgaacgccaaccccaacgccaaccccaacgccaaccccaacgcgaacccgaacgccaaccccgccgcguaugagccgagcgacaagcacaucaaggaguaccugaacaagauccagaacucccucgcggccuacaucaagcccggcuccgcgaacaagcccaaggacgagcuggacuacgccaacgacaucgagaagaagaucugcaagauggagaagugcagcgccgccuacgccaaguucguggccgccuggacccugaaggcggccgccugaggacuagucccuguucccagagcccacuuuuuuuucuuuuuuugaaauaaaauagccugucuuucagaucuaaaaaaaaaaaaaaaaaaaaaaaaaaaaaaaaaaaaaaaaaaaaaaaaaaaaaaaaaaaaaaaaugcaucccccccccccccccccccccccccccccccaaaggcucuuuucagagccaccagaauu

SEQ ID NO: 8974 - RNA, 1456 nt, Artificial Sequence
  mRNA Design a-3 (A64-N5-C30-hSL-N5) comprising derived and/or modified sequence from Pf(3D7)__XP_001351122.1__HsALB_Pf-CSP(19-272)_L(AAY)_Pf-CSP(310-3 27)_L(AAY)_Pf-CSP(346-375)_L(AAY)_PADRE_L(AAY)_P2 (opt1)
aggagagggcgcuuggcuugcaaggacccugagcugcggcauugaagcacacccaacccaacucgacugaagucagccucacugaaccggaucugagaaucuucucucucugggcuugccagggcucuccgaaccuagcuagcauccucuucaauuccaacuagaaagcuuaccaugaagugggugaccuucaucagccuccuguuccuguucuccagcgccuacucccuguuccaggaguaccagugcuacggcuccagcuccaacacccgggugcucaacgagcugaacuacgacaacgcggggaccaaccuguacaacgagcucgagaugaacuacuacggcaagcaggagaacugguacagccugaagaagaacucccgcagccugggggagaacgacgacggcaacaacgaggacaacgagaagcuccggaagcccaagcacaagaagcugaagcagccggccgacgggaaccccgaccccaacgccaaccccaacguggacccgaacgccaaccccaacgucgaccccaacgccaaccccaacguggacccgaacgcgaaccccaacgccaaccccaacgccaaccccaacgccaacccgaacgcgaaccccaacgccaaccccaacgccaaccccaacgccaacccgaacgccaaccccaacgcgaaccccaacgccaaccccaacgccaacccgaacgccaaccccaacgccaaccccaacgcgaaccccaacgccaacccgaacgccaaccccaacguggaccccaacgccaaccccaacgccaacccgaacgcgaaccccaacgccaaccccaacgccaacccgaacgccaaccccaacgccaaccccaacgcgaaccccaacgccaacccgaacgccaaccccaacgccaaccccaacgcgaaccccaacgccaacccgaacgccaaccccaacgccaaccccaacgccaaccccaacgcgaacccgaacgccaaccccgcggccuacgagccgagcgacaagcacaucaaggaguaccugaacaagauccagaacucccucgccgcguauaucaagcccggcuccgcgaacaagcccaaggacgagcuggacuacgccaacgacaucgagaagaagaucugcaagauggagaagugcagcgccgccuacgccaaguucguggccgccuggacccugaaggcggccgccgccgcuuaccaguacaucaaggccaacagcaaguucaucggcaucaccgagcugugaggacuagucccuguucccagagcccacuuuuuuuucuuuuuuugaaauaaaauagccugucuuucagaucuaaaaaaaaaaaaaaaaaaaaaaaaaaaaaaaaaaaaaaaaaaaaaaaaaaaaaaaaaaaaaaaaugcaucccccccccccccccccccccccccccccccaaaggcucuuuucagagccaccagaauu

SEQ ID NO: 8975 - RNA, 1420 nt, Artificial Sequence
  mRNA Design a-3 (A64-N5-C30-hSL-N5) comprising derived and/or modified sequence from Pf(3D7)__XP_001351122.1__HsALB_Pf-CSP(19-272)_L(AAY)_Pf-CSP(310-3 27)_Linker (AAY)_Pf-CSP(346-397) (opt1)
aggagagggcgcuuggcuugcaaggacccugagcugcggcauugaagcacacccaacccaacucgacugaagucagccucacugaaccggaucugagaaucuucucucucugggcuugccagggcucuccgaaccuagcuagcauccucuucaauuccaacuagaaagcuuaccaugaagugggugaccuucaucagccuccuguuccuguucuccagcgccuacucccuguuccaggaguaccagugcuacggcuccagcuccaacacccgggugcucaacgagcugaacuacgacaacgcggggaccaaccuguacaacgagcucgagaugaacuacuacggcaagcaggagaacugguacagccugaagaagaacucccgcagccugggggagaacgacgacggcaacaacgaggacaacgagaagcuccggaagcccaagcacaagaagcugaagcagccggccgacgggaaccccgaccccaacgccaaccccaacguggacccgaacgccaaccccaacgucgaccccaacgccaaccccaacguggacccgaacgcgaaccccaacgccaaccccaacgccaaccccaacgccaacccgaacgcgaaccccaacgccaaccccaacgccaaccccaacgccaacccgaacgccaaccccaacgcgaaccccaacgccaaccccaacgccaacccgaacgccaaccccaacgccaaccccaacgcgaaccccaacgccaacccgaacgccaaccccaacguggaccccaacgccaaccccaacgccaacccgaacgcgaaccccaacgccaaccccaacgccaacccgaacgccaaccccaacgccaaccccaacgcgaaccccaacgccaacccgaacgccaaccccaacgccaaccccaacgcgaaccccaacgccaacccgaacgccaaccccaacgccaaccccaacgccaaccccaacgcgaacccgaacgccaaccccgcggccuacgagccgagcgacaagcacaucaaggaguaccugaacaagauccagaacucccucgccgcguauaucaagcccggcuccgcgaacaagcccaaggacgagcuggacuacgccaacgacaucgagaagaagaucugcaagauggagaagugcagcuccguguucaacguggucaacagcuccaucgggcugaucauggugcucagcuuccuguuccugaacugaggacuagucccuguucccagagcccacuuuuuuuucuuuuuuugaaauaaaauagccugucuuucagaucuaaaaaaaaaaaaaaaaaaaaaaaaaaaaaaaaaaaaaaaaaaaaaaaaaaaaaaaaaaaaaaaaugcaucccccccccccccccccccccccccccccccaaaggcucuuuucagagccaccagaauu

SEQ ID NO: 8976 - RNA, 2020 nt, Artificial Sequence
  mRNA Design a-3 (A64-N5-C30-hSL-N5) comprising derived and/or modified sequence from Pf(3D7)__XP_001351122.1__LumSynt_L(GGS4-GGG)_Pf-CSP(19-397) (opt1)
aggagagggcgcuuggcuugcaaggacccugagcugcggcauugaagcacacccaacccaacucgacugaagucagccucacugaaccggaucugagaaucuucucucucugggcuugccagggcucuccgaaccuagcuagcauccucuucaauuccaacuagaaagcuuaccaugcagaucuacgagggcaagcugaccgccgaggggcuccgcuucggcaucguggccagccgguucaaccacgcgcuggucgaccgccugguggagggggccaucgacgccaucgugcggcacggcgggcgcgaggaggacaucacccucguccgggugcccggcuccugggagaucccgguggccgccggcgagcuggcgcgcaaggaggacaucgacgccgucaucgccaucggggugcugauccggggcgccacgccccacuucgacuacaucgcgagcgagguguccaaggggcucgccgaccugagccuggagcuccgcaagcccaucaccuucggcgucaucaccgccgacacccuggagcaggccaucgagcgggccgggacgaagcacggcaacaagggcugggaggcggcccuguccgccaucgagauggccaaccucuucaagagccugcgcgggggcuccgggggcagcggcggguccggcgggagcggcgggggccuguuccaggaguaccagugcuacggcuccagcuccaacacccgggugcucaacgagcugaacuacgacaacgccgggaccaaccuguacaacgagcucgagaugaacuacuacggcaagcaggagaacugguacagccugaagaagaacucccgcagccugggggagaacgacgacggcaacaacgaggacaacgagaagcuccggaagcccaagcacaagaagcugaagcagccggcggacgggaaccccgaccccaacgccaaccccaacguggacccgaacgccaaccccaacgucgaccccaacgccaaccccaacguggacccgaacgccaaccccaacgcgaaccccaacgccaaccccaacgccaacccgaacgccaaccccaacgccaaccccaacgcgaaccccaacgccaacccgaacgccaaccccaacgccaaccccaacgcgaaccccaacgccaacccgaacgccaaccccaacgccaaccccaacgccaaccccaacgcgaacccgaacgccaaccccaacguggaccccaacgccaacccgaacgccaaccccaacgccaaccccaacgcgaaccccaacgccaacccgaacgccaaccccaacgccaaccccaacgccaaccccaacgcgaacccgaacgccaaccccaacgccaaccccaacgccaaccccaacgcgaacccgaacgccaaccccaacgccaaccccaacgccaaccccaacgccaacccgaacgcgaaccccaacaagaacaaccagggcaacggccaggggcacaacaugcccaacgaccccaaccgcaacgucgacgagaacgccaacgccaacuccgccgugaagaacaacaacaacgaggagccgagcgacaagcacaucaaggaguaccugaacaagauccagaacucccucagcaccgaguggagccccugcuccgugacgugcggcaacgggauccagguccggaucaagcccggcagcgccaacaagcccaaggacgagcuggacuacgcgaacgacaucgagaagaagaucugcaagauggagaagugcuccagcguguucaacguggucaacuccagcaucgggcugaucauggugcucuccuuccuguuccugaacugaggacuagucccuguucccagagcccacuuuuuuuucuuuuuuugaaauaaaauagccugucuuucagaucuaaaaaaaaaaaaaaaaaaaaaaaaaaaaaaaaaaaaaaaaaaaaaaaaaaaaaaaaaaaaaaaaugcaucccccccccccccccccccccccccccccccaaaggcucuuuucagagccaccagaauu

SEQ ID NO: 8977 - RNA, 1882 nt, Artificial Sequence
  mRNA Design a-3 (A64-N5-C30-hSL-N5) comprising derived and/or modified sequence from Pf(3D7)__XP_001351122.1__HsALB_Pf-CSP(19-272)_L(PVTN)_HBsAg (opt1)
aggagagggcgcuuggcuugcaaggacccugagcugcggcauugaagcacacccaacccaacucgacugaagucagccucacugaaccggaucugagaaucuucucucucugggcuugccagggcucuccgaaccuagcuagcauccucuucaauuccaacuagaaagcuuaccaugaagugggugaccuucaucagccuccuguuccuguucuccagcgccuacucccuguuccaggaguaccagugcuacggcagcuccagcaacacccgcguccucaacgagcugaacuacgacaacgccgggaccaaccuguacaacgagcucgagaugaacuacuacggcaagcaggagaacugguacucccugaagaagaacagccggucccugggggagaacgacgacggcaacaacgaggacaacgagaagcuccgcaagcccaagcacaagaagcugaagcagccggcggacgggaaccccgaccccaacgccaaccccaacguggacccgaacgccaaccccaacguggaccccaacgccaaccccaacgucgacccgaacgccaaccccaacgcgaaccccaacgccaaccccaacgccaacccgaacgccaaccccaacgcgaaccccaacgccaaccccaacgccaacccgaacgccaaccccaacgccaaccccaacgcgaaccccaacgccaacccgaacgccaaccccaacgccaaccccaacgccaaccccaacgcgaacccgaacgccaaccccaacguggaccccaacgccaaccccaacgccaacccgaacgccaaccccaacgcgaaccccaacgccaacccgaacgccaaccccaacgccaaccccaacgccaaccccaacgcgaacccgaacgccaaccccaacgccaaccccaacgccaaccccaacgcgaacccgaacgccaaccccaacgccaaccccaacgccaaccccaacgccaacccgaacgcgaacccgcccgugaccaacauggagaacaucaccagcggcuuccugggcccccuccugguccugcaggccggguucuuccuccugacccggauccugacgaucccccagucccucgacagcugguggaccucccugaacuuccugggcgggagccccgugugccucggccagaacucccagagccccaccuccaaccacagccccaccuccugcccgcccaucugccccggguaccgcuggaugugccugcggcgcuucaucaucuuccuguucauccuccugcugugccucaucuuccugcuggugcuccuggacuaccagggcaugcugcccgucugcccgcucauccccggcagcacgaccaccaacaccgggcccugcaagacgugcaccaccccggcccagggcaacagcauguuccccuccugcugcugcaccaagcccacggacgggaacugcacgugcauccccaucccgagcuccugggccuucgccaaguaccugugggagugggcgagcgugcgguucuccuggcugagccuccuggugcccuucguccagugguucgugggccugucccccaccguguggcucagcgccaucuggaugaugugguacuggggccccucccuguacagcaucgucuccccguucaucccccugcuccccaucuucuucugccuguggguguacaucugaggacuagucccuguucccagagcccacuuuuuuuucuuuuuuugaaauaaaauagccugucuuucagaucuaaaaaaaaaaaaaaaaaaaaaaaaaaaaaaaaaaaaaaaaaaaaaaaaaaaaaaaaaaaaaaaaugcaucccccccccccccccccccccccccccccccaaaggcucuuuucagagccaccagaauu

SEQ ID NO: 8978 - RNA, 1999 nt, Artificial Sequence
  mRNA Design a-3 (A64-N5-C30-hSL-N5) comprising derived and/or modified sequence from Pf(3D7)__XP_001351122.1__HsALB_Pf-CSP(19-272)_L(AAY)_Pf-CSP(346-3 65)_L(AAY)_PADRE_L(PVTN)_HBsAg (opt1)
aggagagggcgcuuggcuugcaaggacccugagcugcggcauugaagcacacccaacccaacucgacugaagucagccucacugaaccggaucugagaaucuucucucucugggcuugccagggcucuccgaaccuagcuagcauccucuucaauuccaacuagaaagcuuaccaugaagugggugaccuucaucagccugcuguuccuguucuccagcgccuacucccuguuccaggaguaccagugcuacggcagcuccagcaacacccgcguccucaacgagcugaacuacgacaacgccgggaccaaccuguacaacgagcucgagaugaacuacuacggcaagcaggagaacugguacucccugaagaagaacagccggucccugggggagaacgacgacggcaacaacgaggacaacgagaagcuccgcaagcccaagcacaagaagcugaagcagccggcggacgggaaccccgaccccaacgccaaccccaacguggacccgaacgccaaccccaacguggaccccaacgccaaccccaacgucgacccgaacgccaaccccaacgcgaaccccaacgccaaccccaacgccaacccgaacgccaaccccaacgcgaaccccaacgccaaccccaacgccaacccgaacgccaaccccaacgccaaccccaacgcgaaccccaacgccaacccgaacgccaaccccaacgccaaccccaacgccaaccccaacgcgaacccgaacgccaaccccaacguggaccccaacgccaaccccaacgccaacccgaacgccaaccccaacgcgaaccccaacgccaacccgaacgccaaccccaacgccaaccccaacgccaaccccaacgcgaacccgaacgccaaccccaacgccaaccccaacgccaaccccaacgcgaacccgaacgccaaccccaacgccaaccccaacgccaaccccaacgccaacccgaacgcgaaccccgccgccuacaucaagcccggcagcgccaacaagcccaaggacgagcuggacuacgccaacgacaucgaggcggccuacgccaaguucguggccgccuggacccucaaggcggccgccccggucaccaacauggagaacaucaccuccggcuuccuggggccccugcucgugcugcaggccggcuucuuccugcucacgcggauccugaccaucccccagagccuggacuccugguggaccagccucaacuuccucgggggcucccccgugugccuggggcagaacagccaguccccgaccagcaaccacucccccacgagcugcccgcccaucugccccggcuaccgcuggaugugccuccggcgcuucaucaucuuccuguucauccugcuccugugccugaucuuccuccugguccugcucgacuaccagggcaugcugcccgugugcccccugaucccggggagcaccaccaccaacacgggccccugcaagaccugcaccacccccgcgcaggggaacuccauguuccccagcugcugcugcacgaagccgaccgacggcaacugcacgugcauccccauccccuccagcugggccuucgccaaguaccucugggagugggccuccgugcgguucagcuggcugucccugcucguccccuucgugcagugguucgugggccugagcccgaccgucuggcuguccgccaucuggaugaugugguacugggggcccagccucuacuccaucgugagccccuucaucccccugcugccgaucuucuucugccucuggguguacaucugaggacuagucccuguucccagagcccacuuuuuuuucuuuuuuugaaauaaaauagccugucuuucagaucuaaaaaaaaaaaaaaaaaaaaaaaaaaaaaaaaaaaaaaaaaaaaaaaaaaaaaaaaaaaaaaaaugcaucccccccccccccccccccccccccccccccaaaggcucuuuucagagccaccagaauu

SEQ ID NO: 8979 - RNA, 2218 nt, Artificial Sequence
  mRNA Design a-3 (A64-N5-C30-hSL-N5) comprising derived and/or modified sequence from Pf(3D7)__XP_001351122.1__HsALB_Pf-CSP(19-384)_L(PVTN)_HBsAg (opt1)
aggagagggcgcuuggcuugcaaggacccugagcugcggcauugaagcacacccaacccaacucgacugaagucagccucacugaaccggaucugagaaucuucucucucugggcuugccagggcucuccgaaccuagcuagcauccucuucaauuccaacuagaaagcuuaccaugaagugggugaccuucaucagccugcuguuccuguucuccagcgccuacucccuguuccaggaguaccagugcuacggcagcuccagcaacacccgcguccucaacgagcugaacuacgacaacgccgggacgaaccuguacaacgagcucgagaugaacuacuacggcaagcaggagaacugguacucccugaagaagaacagccggucccugggggagaacgacgacggcaacaacgaggacaacgagaagcuccgcaagcccaagcacaagaagcugaagcagccggcggacgggaaccccgaccccaacgccaaccccaacguggacccgaacgccaaccccaacguggaccccaacgccaaccccaacgucgacccgaacgccaaccccaacgcgaaccccaacgccaaccccaacgccaacccgaacgccaaccccaacgcgaaccccaacgccaaccccaacgccaacccgaacgccaaccccaacgccaaccccaacgcgaaccccaacgccaacccgaacgccaaccccaacgccaaccccaacgccaaccccaacgcgaacccgaacgccaaccccaacguggaccccaacgccaaccccaacgccaacccgaacgccaaccccaacgcgaaccccaacgccaacccgaacgccaaccccaacgccaaccccaacgccaaccccaacgcgaacccgaacgccaaccccaacgccaaccccaacgccaaccccaacgcgaacccgaacgccaaccccaacgccaaccccaacgccaaccccaacgccaacccgaacgcgaaccccaacaagaacaaccagggcaacggccaggggcacaacaugcccaacgaccccaaccggaacguggacgagaacgccaacgccaacagcgccgucaagaacaacaacaacgaggagccguccgacaagcacaucaaggaguaccugaacaagauccagaacagccucuccaccgaguggagccccugcuccgugaccugcggcaacgggauccaggugcgcaucaagcccggcagcgccaacaagcccaaggacgagcuggacuacgcgaacgacaucgagaagaagaucugcaagauggagaagugcuccagcgucuucaacguggugaacuccagcccggucaccaacauggagaacaucacgagcggguuccugggcccccuccuggugcugcaggccggcuucuuccuccugacccggauccugaccaucccccagucccucgacagcugguggaccucccugaacuuccucgggggcagccccgugugccucgggcagaacucccagagcccgacguccaaccacagccccaccuccugcccgcccaucugccccggcuaccgcuggaugugccugcggcgcuucaucaucuuccuguucauccuccugcugugccucaucuuccugcugguccuccuggacuaccagggcaugcugcccgugugcccccucaucccggggagcaccaccacgaacaccggccccugcaagaccugcaccacgcccgcccaggggaacuccauguuccccagcugcugcugcaccaagccgaccgacggcaacugcacgugcauccccauccccuccagcugggccuucgccaaguaccugugggagugggcguccgugcgguucagcuggcugucccuccugguccccuucgugcagugguucguggggcugagcccgaccgucuggcucuccgccaucuggaugaugugguacuggggccccagccuguacagcaucgugucccccuucaucccccugcucccgaucuucuucugccuguggguguacaucugaggacuagucccuguucccagagcccacuuuuuuuucuuuuuuugaaauaaaauagccugucuuucagaucuaaaaaaaaaaaaaaaaaaaaaaaaaaaaaaaaaaaaaaaaaaaaaaaaaaaaaaaaaaaaaaaaugcaucccccccccccccccccccccccccccccccaaaggcucuuuucagagccaccagaauu

SEQ ID NO: 8980 - RNA, 2035 nt, Artificial Sequence
  mRNA Design a-3 (A64-N5-C30-hSL-N5) comprising derived and/or modified sequence from Pf(3D7)__XP_001351122.1__HsALB_Pf-CSP(19-384)_L(SGG)_Ferritin (opt1)
aggagagggcgcuuggcuugcaaggacccugagcugcggcauugaagcacacccaacccaacucgacugaagucagccucacugaaccggaucugagaaucuucucucucugggcuugccagggcucuccgaaccuagcuagcauccucuucaauuccaacuagaaagcuuaccaugaagugggugaccuucaucagccuccuguuccuguucuccagcgccuacucccuguuccaggaguaccagugcuacggcagcuccagcaacacccggguccucaacgagcugaacuacgacaacgccgggacgaaccuguacaacgagcucgagaugaacuacuacggcaagcaggagaacugguacucccugaagaagaacagccggucccugggggagaacgacgacggcaacaacgaggacaacgagaagcuccgcaagcccaagcacaagaagcugaagcagccggcggacgggaaccccgaccccaacgccaaccccaacguggacccgaacgccaaccccaacguggaccccaacgccaaccccaacgucgacccgaacgccaaccccaacgcgaaccccaacgccaaccccaacgccaacccgaacgccaaccccaacgcgaaccccaacgccaaccccaacgccaacccgaacgccaaccccaacgccaaccccaacgcgaaccccaacgccaacccgaacgccaaccccaacgccaaccccaacgccaaccccaacgcgaacccgaacgccaaccccaacguggaccccaacgccaaccccaacgccaacccgaacgccaaccccaacgcgaaccccaacgccaacccgaacgccaaccccaacgccaaccccaacgccaaccccaacgcgaacccgaacgccaaccccaacgccaaccccaacgccaaccccaacgcgaacccgaacgccaaccccaacgccaaccccaacgccaaccccaacgccaacccgaacgcgaaccccaacaagaacaaccagggcaacggccaggggcacaacaugcccaacgaccccaaccggaacguggacgagaacgccaacgccaacagcgccgucaagaacaacaacaacgaggagccguccgacaagcacaucaaggaguaccugaacaagauccagaacagccucuccaccgaguggagccccugcuccgugaccugcggcaacgggauccaggugcgcaucaagcccggcagcgccaacaagcccaaggacgagcuggacuacgcgaacgacaucgagaagaagaucugcaagauggagaagugcuccagcgucuucaacguggugaacuccagcagcgggggccuguccaaggacaucaucaagcuccugaacgagcaggucaacaaggagaugaacagcuccaaccuguacaugagcauguccagcuggugcuacacccacucccucgacggcgccgggcuguuccuguucgaccacgccgccgaggaguacgagcacgccaagaagcucaucaucuuccugaacgagaacaacgugccggugcagcugacgagcaucuccgcgcccgagcacaaguucgagggccucacccagaucuuccagaaggccuacgagcacgagcagcacaucagcgaguccaucaacaacaucgucgaccacgccaucaagagcaaggaccacgccaccuucaacuuccugcagugguacguggcggagcagcacgaggaggaggugcuguucaaggacauccucgacaagaucgagcugaucgggaacgagaaccacggccuguaccucgccgaccaguacgucaagggcaucgccaagucccgcaagagcugaggacuagucccuguucccagagcccacuuuuuuuucuuuuuuugaaauaaaauagccugucuuucagaucuaaaaaaaaaaaaaaaaaaaaaaaaaaaaaaaaaaaaaaaaaaaaaaaaaaaaaaaaaaaaaaaaugcaucccccccccccccccccccccccccccccccaaaggcucuuuucagagccaccagaauu

SEQ ID NO: 8981 - RNA, 1996 nt, Artificial Sequence
  mRNA Design a-3 (A64-N5-C30-hSL-N5) comprising derived and/or modified sequence from Pf(3D7)__XP_001351122.1__HsALB_Pf-CSP(93-384)_L(PVTN)_HBsAg (opt1)
aggagagggcgcuuggcuugcaaggacccugagcugcggcauugaagcacacccaacccaacucgacugaagucagccucacugaaccggaucugagaaucuucucucucugggcuugccagggcucuccgaaccuagcuagcauccucuucaauuccaacuagaaagcuuaccaugaagugggugaccuucaucagccuccuguuccuguucuccagcgccuacuccaagcugaagcagcccgccgacggcaacccggaccccaacgcgaaccccaacgucgaccccaacgccaacccgaacguggaccccaacgccaaccccaacguggaccccaacgccaacccgaacgccaaccccaacgcgaaccccaacgccaaccccaacgccaacccgaacgccaaccccaacgcgaaccccaacgccaaccccaacgccaacccgaacgccaaccccaacgccaaccccaacgcgaaccccaacgccaacccgaacgccaaccccaacgccaaccccaacgccaaccccaacgcgaacccgaacgucgaccccaacgccaaccccaacgccaaccccaacgccaacccgaacgccaaccccaacgcgaaccccaacgccaacccgaacgccaaccccaacgccaaccccaacgccaaccccaacgcgaacccgaacgccaaccccaacgccaaccccaacgccaaccccaacgcgaacccgaacgccaaccccaacgccaaccccaacgccaaccccaacgccaacccgaacaagaacaaccaggggaacggccaggggcacaacaugcccaacgaccccaaccgcaacguggacgagaacgcgaacgccaacagcgccgugaagaacaacaacaacgaggagcccuccgacaagcacaucaaggaguaccucaacaagauccagaacagccuguccaccgaguggagcccgugcuccgugaccugcggcaacgggauccagguccggaucaagcccggcagcgccaacaagcccaaggacgagcuggacuacgccaacgacaucgagaagaagaucugcaagauggagaagugcuccagcguguucaacgucgugaacuccagccccgugaccaacauggagaacaucaccuccggcuuccucgggccgcugcugguccuccaggcgggcuucuuccugcugacccgcauccucacgaucccccagagccuggacuccugguggaccagccugaacuuccucgggggcucccccgugugccuggggcagaacagccagagccccaccuccaaccacagcccgaccuccugcccgcccaucugccccggcuaccgguggaugugccugcgccgguucaucaucuuccucuucauccugcugcucugccugaucuuccugcucgugcugcuggacuaccagggcaugcuccccgucugcccccugauccccgggagcacgaccaccaacaccggcccgugcaagacgugcaccacccccgcccaggggaacuccauguuccccagcugcugcugcaccaagcccacggacggcaacugcacgugcaucccgauccccuccagcugggccuucgccaaguaccugugggagugggccuccgugcgcuucagcuggcucucccugcuggugcccuucguccagugguucgugggccucagccccaccguguggcuguccgcgaucuggaugaugugguacugggggccgagccuguacuccaucgucagccccuucaucccccuccugcccaucuucuucugccuguggguguacaucugaggacuagucccuguucccagagcccacuuuuuuuucuuuuuuugaaauaaaauagccugucuuucagaucuaaaaaaaaaaaaaaaaaaaaaaaaaaaaaaaaaaaaaaaaaaaaaaaaaaaaaaaaaaaaaaaaugcaucccccccccccccccccccccccccccccccaaaggcucuuuucagagccaccagaauu

SEQ ID NO: 8982 - RNA, 1657 nt, Artificial Sequence; identical to SEQ ID NO: 6374
  mRNA Design a-3 (A64-N5-C30-hSL-N5) comprising derived and/or modified sequence from Pf(3D7)__XP_001351122.1__HsALB_Pf-CSP(199-377)_L(PVTN)_HBsAg (opt1)

SEQ ID NO: 8983 - RNA, 1354 nt, Artificial Sequence
  mRNA Design a-3 (A64-N5-C30-hSL-N5) comprising derived and/or modified sequence from Pf(3D7)__XP_001351122.1__HsALB_Pf-CSP(19-272)_L(AAY)_Pf-CSP(346-3 75)_L(AAY)_Pf-CSP(310-327) (opt1)
aggagagggcgcuuggcuugcaaggacccugagcugcggcauugaagcacacccaacccaacucgacugaagucagccucacugaaccggaucugagaaucuucucucucugggcuugccagggcucuccgaaccuagcuagcauccucuucaauuccaacuagaaagcuuaccaugaagugggugaccuucaucagccuccuguuccuguucuccagcgccuacucccuguuccaggaguaccagugcuacggcagcuccagcaacacccgcguccucaacgagcugaacuacgacaacgccgggacgaaccuguacaacgagcucgagaugaacuacuacggcaagcaggagaacugguacucccugaagaagaacagccggucccugggggagaacgacgacggcaacaacgaggacaacgagaagcuccgcaagcccaagcacaagaagcugaagcagccggcggacgggaaccccgaccccaacgccaaccccaacguggacccgaacgccaaccccaacguggaccccaacgccaaccccaacgucgacccgaacgccaaccccaacgcgaaccccaacgccaaccccaacgccaacccgaacgccaaccccaacgcgaaccccaacgccaaccccaacgccaacccgaacgccaaccccaacgccaaccccaacgcgaaccccaacgccaacccgaacgccaaccccaacgccaaccccaacgccaaccccaacgcgaacccgaacgccaaccccaacguggaccccaacgccaaccccaacgccaacccgaacgccaaccccaacgcgaaccccaacgccaacccgaacgccaaccccaacgccaaccccaacgccaaccccaacgcgaacccgaacgccaaccccaacgccaaccccaacgccaaccccaacgcgaacccgaacgccaaccccaacgccaaccccaacgccaaccccaacgccaacccgaacgcgaaccccgccgccuacaucaagcccggcagcgccaacaagcccaaggacgagcuggacuacgccaacgacaucgagaagaagaucugcaagauggagaagugcuccgcggccuacgagccgagcgacaagcacaucaaggaguaccucaacaagauccagaacucccugugaggacuagucccuguucccagagcccacuuuuuuuucuuuuuuugaaauaaaauagccugucuuucagaucuaaaaaaaaaaaaaaaaaaaaaaaaaaaaaaaaaaaaaaaaaaaaaaaaaaaaaaaaaaaaaaaaugcaucccccccccccccccccccccccccccccccaaaggcucuuuucagagccaccagaauu

SEQ ID NO: 8984 - RNA, 1402 nt, Artificial Sequence
  mRNA Design a-3 (A64-N5-C30-hSL-N5) comprising derived and/or modified sequence from Pf(3D7)__XP_001351122.1__HsALB_Pf-CSP(19-272)_L(AAY)_Pf-CSP(346-3 75)_L(AAY)_Pf-CSP(310-327)_L(AAY)_PADRE (opt1)
aggagagggcgcuuggcuugcaaggacccugagcugcggcauugaagcacacccaacccaacucgacugaagucagccucacugaaccggaucugagaaucuucucucucugggcuugccagggcucuccgaaccuagcuagcauccucuucaauuccaacuagaaagcuuaccaugaagugggugaccuucaucagccuccuguuccuguucuccagcgccuacucccuguuccaggaguaccagugcuacggcagcuccagcaacacccgcguccucaacgagcugaacuacgacaacgccgggacgaaccuguacaacgagcucgagaugaacuacuacggcaagcaggagaacugguacucccugaagaagaacagccggucccugggggagaacgacgacggcaacaacgaggacaacgagaagcuccgcaagcccaagcacaagaagcugaagcagccggcggacgggaaccccgaccccaacgccaaccccaacguggacccgaacgccaaccccaacguggaccccaacgccaaccccaacgucgacccgaacgccaaccccaacgcgaaccccaacgccaaccccaacgccaacccgaacgccaaccccaacgcgaaccccaacgccaaccccaacgccaacccgaacgccaaccccaacgccaaccccaacgcgaaccccaacgccaacccgaacgccaaccccaacgccaaccccaacgccaaccccaacgcgaacccgaacgccaaccccaacguggaccccaacgccaaccccaacgccaacccgaacgccaaccccaacgcgaaccccaacgccaacccgaacgccaaccccaacgccaaccccaacgccaaccccaacgcgaacccgaacgccaaccccaacgccaaccccaacgccaaccccaacgcgaacccgaacgccaaccccaacgccaaccccaacgccaaccccaacgccaacccgaacgcgaaccccgccgccuacaucaagcccggcagcgccaacaagcccaaggacgagcuggacuacgccaacgacaucgagaagaagaucugcaagauggagaagugcuccgcggccuacgagccgagcgacaagcacaucaaggaguaccucaacaagauccagaacucccuggccgccuacgccaaguucguggcggccuggacccugaaggccgccgcgugaggacuagucccuguucccagagcccacuuuuuuuucuuuuuuugaaauaaaauagccugucuuucagaucuaaaaaaaaaaaaaaaaaaaaaaaaaaaaaaaaaaaaaaaaaaaaaaaaaaaaaaaaaaaaaaaaugcaucccccccccccccccccccccccccccccccaaaggcucuuuucagagccaccagaauu

SEQ ID NO: 8985 - RNA, 1402 nt, Artificial Sequence
  mRNA Design a-3 (A64-N5-C30-hSL-N5) comprising derived and/or modified sequence from Pf(3D7)__XP_001351122.1__HsALB_Pf-CSP(19-272)_L(AAY)_Pf-CSP(310-3 27)_L(AAY)_Pf-CSP(346-375)_L(AAY)_PADRE (opt1)
aggagagggcgcuuggcuugcaaggacccugagcugcggcauugaagcacacccaacccaacucgacugaagucagccucacugaaccggaucugagaaucuucucucucugggcuugccagggcucuccgaaccuagcuagcauccucuucaauuccaacuagaaagcuuaccaugaagugggugaccuucaucagccuccuguuccuguucuccagcgccuacucccuguuccaggaguaccagugcuacggcagcuccagcaacacccgcguccucaacgagcugaacuacgacaacgccgggacgaaccuguacaacgagcucgagaugaacuacuacggcaagcaggagaacugguacucccugaagaagaacagccggucccugggggagaacgacgacggcaacaacgaggacaacgagaagcuccgcaagcccaagcacaagaagcugaagcagccggcggacgggaaccccgaccccaacgccaaccccaacguggacccgaacgccaaccccaacguggaccccaacgccaaccccaacgucgacccgaacgccaaccccaacgcgaaccccaacgccaaccccaacgccaacccgaacgccaaccccaacgcgaaccccaacgccaaccccaacgccaacccgaacgccaaccccaacgccaaccccaacgcgaaccccaacgccaacccgaacgccaaccccaacgccaaccccaacgccaaccccaacgcgaacccgaacgccaaccccaacguggaccccaacgccaaccccaacgccaacccgaacgccaaccccaacgcgaaccccaacgccaacccgaacgccaaccccaacgccaaccccaacgccaaccccaacgcgaacccgaacgccaaccccaacgccaaccccaacgccaaccccaacgcgaacccgaacgccaaccccaacgccaaccccaacgccaaccccaacgccaacccgaacgcgaaccccgccgccuacgagcccagcgacaagcacaucaaggaguaccugaacaagauccagaacucccucgccgccuacaucaagcccggcagcgcgaacaagccgaaggacgagcuggacuacgccaacgacaucgagaagaagaucugcaagauggagaagugcuccgccgccuacgccaaguucguggcggccuggacccugaaggccgccgcgugaggacuagucccuguucccagagcccacuuuuuuuucuuuuuuugaaauaaaauagccugucuuucagaucuaaaaaaaaaaaaaaaaaaaaaaaaaaaaaaaaaaaaaaaaaaaaaaaaaaaaaaaaaaaaaaaaugcaucccccccccccccccccccccccccccccccaaaggcucuuuucagagccaccagaauu

SEQ ID NO: 8986 - RNA, 1456 nt, Artificial Sequence
  mRNA Design a-3 (A64-N5-C30-hSL-N5) comprising derived and/or modified sequence from Pf(3D7)__XP_001351122.1__HsALB_Pf-CSP(19-272)_L(AAY)_Pf-CSP(310-3 27)_L(AAY)_Pf-CSP(346-375)_L(AAY)_PADRE_L(AAY)_P2 (opt1)
aggagagggcgcuuggcuugcaaggacccugagcugcggcauugaagcacacccaacccaacucgacugaagucagccucacugaaccggaucugagaaucuucucucucugggcuugccagggcucuccgaaccuagcuagcauccucuucaauuccaacuagaaagcuuaccaugaagugggugaccuucaucagccuccuguuccuguucuccagcgccuacucccuguuccaggaguaccagugcuacggcagcuccagcaacacccgcguccucaacgagcugaacuacgacaacgccgggacgaaccuguacaacgagcucgagaugaacuacuacggcaagcaggagaacugguacucccugaagaagaacagccggucccugggggagaacgacgacggcaacaacgaggacaacgagaagcuccgcaagcccaagcacaagaagcugaagcagccggcggacgggaaccccgaccccaacgccaaccccaacguggacccgaacgccaaccccaacguggaccccaacgccaaccccaacgucgacccgaacgccaaccccaacgcgaaccccaacgccaaccccaacgccaacccgaacgccaaccccaacgcgaaccccaacgccaaccccaacgccaacccgaacgccaaccccaacgccaaccccaacgcgaaccccaacgccaacccgaacgccaaccccaacgccaaccccaacgccaaccccaacgcgaacccgaacgccaaccccaacguggaccccaacgccaaccccaacgccaacccgaacgccaaccccaacgcgaaccccaacgccaacccgaacgccaaccccaacgccaaccccaacgccaaccccaacgcgaacccgaacgccaaccccaacgccaaccccaacgccaaccccaacgcgaacccgaacgccaaccccaacgccaaccccaacgccaaccccaacgccaacccgaacgcgaaccccgccgccuacgagcccagcgacaagcacaucaaggaguaccugaacaagauccagaacucccucgccgccuacaucaagcccggcagcgcgaacaagccgaaggacgagcuggacuacgccaacgacaucgagaagaagaucugcaagauggagaagugcuccgccgccuacgccaaguucguggcggccuggacccugaaggccgccgcggccgccuaccaguacaucaaggccaacagcaaguucaucggcaucaccgagcucugaggacuagucccuguucccagagcccacuuuuuuuucuuuuuuugaaauaaaauagccugucuuucagaucuaaaaaaaaaaaaaaaaaaaaaaaaaaaaaaaaaaaaaaaaaaaaaaaaaaaaaaaaaaaaaaaaugcaucccccccccccccccccccccccccccccccaaaggcucuuuucagagccaccagaauu

SEQ ID NO: 8987 - RNA, 1420 nt, Artificial Sequence
  mRNA Design a-3 (A64-N5-C30-hSL-N5) comprising derived and/or modified sequence from Pf(3D7)__XP_001351122.1__HsALB_Pf-CSP(19-272)_L(AAY)_Pf-CSP(310-3 27)_Linker (AAY)_Pf-CSP(346-397) (opt1)
aggagagggcgcuuggcuugcaaggacccugagcugcggcauugaagcacacccaacccaacucgacugaagucagccucacugaaccggaucugagaaucuucucucucugggcuugccagggcucuccgaaccuagcuagcauccucuucaauuccaacuagaaagcuuaccaugaagugggugaccuucaucagccuccuguuccuguucuccagcgccuacucccuguuccaggaguaccagugcuacggcagcuccagcaacacccgcguccucaacgagcugaacuacgacaacgccgggacgaaccuguacaacgagcucgagaugaacuacuacggcaagcaggagaacugguacucccugaagaagaacagccggucccugggggagaacgacgacggcaacaacgaggacaacgagaagcuccgcaagcccaagcacaagaagcugaagcagccggcggacgggaaccccgaccccaacgccaaccccaacguggacccgaacgccaaccccaacguggaccccaacgccaaccccaacgucgacccgaacgccaaccccaacgcgaaccccaacgccaaccccaacgccaacccgaacgccaaccccaacgcgaaccccaacgccaaccccaacgccaacccgaacgccaaccccaacgccaaccccaacgcgaaccccaacgccaacccgaacgccaaccccaacgccaaccccaacgccaaccccaacgcgaacccgaacgccaaccccaacguggaccccaacgccaaccccaacgccaacccgaacgccaaccccaacgcgaaccccaacgccaacccgaacgccaaccccaacgccaaccccaacgccaaccccaacgcgaacccgaacgccaaccccaacgccaaccccaacgccaaccccaacgcgaacccgaacgccaaccccaacgccaaccccaacgccaaccccaacgccaacccgaacgcgaaccccgccgccuacgagcccagcgacaagcacaucaaggaguaccugaacaagauccagaacucccucgccgccuacaucaagcccggcagcgcgaacaagccgaaggacgagcuggacuacgccaacgacaucgagaagaagaucugcaagauggagaagugcuccagcguguucaacgucgugaacuccagcaucggccugaucauggugcucuccuuccuguuccugaacugaggacuagucccuguucccagagcccacuuuuuuuucuuuuuuugaaauaaaauagccugucuuucagaucuaaaaaaaaaaaaaaaaaaaaaaaaaaaaaaaaaaaaaaaaaaaaaaaaaaaaaaaaaaaaaaaaugcaucccccccccccccccccccccccccccccccaaaggcucuuuucagagccaccagaauu

SEQ ID NO: 8988 - RNA, 2020 nt, Artificial Sequence
  mRNA Design a-3 (A64-N5-C30-hSL-N5) comprising derived and/or modified sequence from Pf(3D7)__XP_001351122.1__LumSynt_L(GGS4-GGG)_Pf-CSP(19-397) (opt2)
aggagagggcgcuuggcuugcaaggacccugagcugcggcauugaagcacacccaacccaacucgacugaagucagccucacugaaccggaucugagaaucuucucucucugggcuugccagggcucuccgaaccuagcuagcauccucuucaauuccaacuagaaagcuuaccaugcagaucuacgagggcaagcucaccgccgagggccuccgcuucggcaucgucgccucccgcuucaaccacgcccucgucgaccgccucgucgagggcgccaucgacgccaucguccgccacggcggccgcgaggaggacaucacccucguccgcguccccggcuccugggagauccccgucgccgccggcgagcucgcccgcaaggaggacaucgacgccgucaucgccaucggcguccucauccgcggcgccaccccccacuucgacuacaucgccuccgaggucuccaagggccucgccgaccucucccucgagcuccgcaagcccaucaccuucggcgucaucaccgccgacacccucgagcaggccaucgagcgcgccggcaccaagcacggcaacaagggcugggaggccgcccucuccgccaucgagauggccaaccucuucaagucccuccgcggcggcuccggcggcuccggcggcuccggcggcuccggcggcggccucuuccaggaguaccagugcuacggcuccuccuccaacacccgcguccucaacgagcucaacuacgacaacgccggcaccaaccucuacaacgagcucgagaugaacuacuacggcaagcaggagaacugguacucccucaagaagaacucccgcucccucggcgagaacgacgacggcaacaacgaggacaacgagaagcuccgcaagcccaagcacaagaagcucaagcagcccgccgacggcaaccccgaccccaacgccaaccccaacgucgaccccaacgccaaccccaacgucgaccccaacgccaaccccaacgucgaccccaacgccaaccccaacgccaaccccaacgccaaccccaacgccaaccccaacgccaaccccaacgccaaccccaacgccaaccccaacgccaaccccaacgccaaccccaacgccaaccccaacgccaaccccaacgccaaccccaacgccaaccccaacgccaaccccaacgccaaccccaacgccaaccccaacgccaaccccaacgucgaccccaacgccaaccccaacgccaaccccaacgccaaccccaacgccaaccccaacgccaaccccaacgccaaccccaacgccaaccccaacgccaaccccaacgccaaccccaacgccaaccccaacgccaaccccaacgccaaccccaacgccaaccccaacgccaaccccaacgccaaccccaacgccaaccccaacgccaaccccaacgccaaccccaacaagaacaaccagggcaacggccagggccacaacaugcccaacgaccccaaccgcaacgucgacgagaacgccaacgccaacuccgccgucaagaacaacaacaacgaggagcccuccgacaagcacaucaaggaguaccucaacaagauccagaacucccucuccaccgaguggucccccugcuccgucaccugcggcaacggcauccagguccgcaucaagcccggcuccgccaacaagcccaaggacgagcucgacuacgccaacgacaucgagaagaagaucugcaagauggagaagugcuccuccgucuucaacgucgucaacuccuccaucggccucaucaugguccucuccuuccucuuccucaacugaggacuagucccuguucccagagcccacuuuuuuuucuuuuuuugaaauaaaauagccugucuuucagaucuaaaaaaaaaaaaaaaaaaaaaaaaaaaaaaaaaaaaaaaaaaaaaaaaaaaaaaaaaaaaaaaaugcaucccccccccccccccccccccccccccccccaaaggcucuuuucagagccaccagaauu

SEQ ID NO: 8989 - RNA, 1882 nt, Artificial Sequence
  mRNA Design a-3 (A64-N5-C30-hSL-N5) comprising derived and/or modified sequence from Pf(3D7)__XP_001351122.1__HsALB_Pf-CSP(19-272)_L(PVTN)_HBsAg (opt2)
aggagagggcgcuuggcuugcaaggacccugagcugcggcauugaagcacacccaacccaacucgacugaagucagccucacugaaccggaucugagaaucuucucucucugggcuugccagggcucuccgaaccuagcuagcauccucuucaauuccaacuagaaagcuuaccaugaagugggucaccuucaucucccuccucuuccucuucuccuccgccuacucccucuuccaggaguaccagugcuacggcuccuccuccaacacccgcguccucaacgagcucaacuacgacaacgccggcaccaaccucuacaacgagcucgagaugaacuacuacggcaagcaggagaacugguacucccucaagaagaacucccgcucccucggcgagaacgacgacggcaacaacgaggacaacgagaagcuccgcaagcccaagcacaagaagcucaagcagcccgccgacggcaaccccgaccccaacgccaaccccaacgucgaccccaacgccaaccccaacgucgaccccaacgccaaccccaacgucgaccccaacgccaaccccaacgccaaccccaacgccaaccccaacgccaaccccaacgccaaccccaacgccaaccccaacgccaaccccaacgccaaccccaacgccaaccccaacgccaaccccaacgccaaccccaacgccaaccccaacgccaaccccaacgccaaccccaacgccaaccccaacgccaaccccaacgccaaccccaacgucgaccccaacgccaaccccaacgccaaccccaacgccaaccccaacgccaaccccaacgccaaccccaacgccaaccccaacgccaaccccaacgccaaccccaacgccaaccccaacgccaaccccaacgccaaccccaacgccaaccccaacgccaaccccaacgccaaccccaacgccaaccccaacgccaaccccaacgccaaccccaacgccaacccccccgucaccaacauggagaacaucaccuccggcuuccucggcccccuccucguccuccaggccggcuucuuccuccucacccgcauccucaccaucccccagucccucgacuccugguggaccucccucaacuuccucggcggcucccccgucugccucggccagaacucccagucccccaccuccaaccacucccccaccuccugcccccccaucugccccggcuaccgcuggaugugccuccgccgcuucaucaucuuccucuucauccuccuccucugccucaucuuccuccucguccuccucgacuaccagggcaugcuccccgucugcccccucauccccggcuccaccaccaccaacaccggccccugcaagaccugcaccacccccgcccagggcaacuccauguuccccuccugcugcugcaccaagcccaccgacggcaacugcaccugcauccccauccccuccuccugggccuucgccaaguaccucugggagugggccuccguccgcuucuccuggcucucccuccucguccccuucguccagugguucgucggccucucccccaccgucuggcucuccgccaucuggaugaugugguacuggggccccucccucuacuccaucgucucccccuucaucccccuccuccccaucuucuucugccucugggucuacaucugaggacuagucccuguucccagagcccacuuuuuuuucuuuuuuugaaauaaaauagccugucuuucagaucuaaaaaaaaaaaaaaaaaaaaaaaaaaaaaaaaaaaaaaaaaaaaaaaaaaaaaaaaaaaaaaaaugcaucccccccccccccccccccccccccccccccaaaggcucuuuucagagccaccagaauu

SEQ ID NO: 8990 - RNA, 1999 nt, Artificial Sequence
  mRNA Design a-3 (A64-N5-C30-hSL-N5) comprising derived and/or modified sequence from Pf(3D7)__XP_001351122.1__HsALB_Pf-CSP(19-272)_L(AAY)_Pf-CSP(346-3 65)_L(AAY)_PADRE_L(PVTN)_HBsAg (opt2)
aggagagggcgcuuggcuugcaaggacccugagcugcggcauugaagcacacccaacccaacucgacugaagucagccucacugaaccggaucugagaaucuucucucucugggcuugccagggcucuccgaaccuagcuagcauccucuucaauuccaacuagaaagcuuaccaugaagugggucaccuucaucucccuccucuuccucuucuccuccgccuacucccucuuccaggaguaccagugcuacggcuccuccuccaacacccgcguccucaacgagcucaacuacgacaacgccggcaccaaccucuacaacgagcucgagaugaacuacuacggcaagcaggagaacugguacucccucaagaagaacucccgcucccucggcgagaacgacgacggcaacaacgaggacaacgagaagcuccgcaagcccaagcacaagaagcucaagcagcccgccgacggcaaccccgaccccaacgccaaccccaacgucgaccccaacgccaaccccaacgucgaccccaacgccaaccccaacgucgaccccaacgccaaccccaacgccaaccccaacgccaaccccaacgccaaccccaacgccaaccccaacgccaaccccaacgccaaccccaacgccaaccccaacgccaaccccaacgccaaccccaacgccaaccccaacgccaaccccaacgccaaccccaacgccaaccccaacgccaaccccaacgccaaccccaacgccaaccccaacgucgaccccaacgccaaccccaacgccaaccccaacgccaaccccaacgccaaccccaacgccaaccccaacgccaaccccaacgccaaccccaacgccaaccccaacgccaaccccaacgccaaccccaacgccaaccccaacgccaaccccaacgccaaccccaacgccaaccccaacgccaaccccaacgccaaccccaacgccaaccccaacgccaaccccgccgccuacaucaagcccggcuccgccaacaagcccaaggacgagcucgacuacgccaacgacaucgaggccgccuacgccaaguucgucgccgccuggacccucaaggccgccgcccccgucaccaacauggagaacaucaccuccggcuuccucggcccccuccucguccuccaggccggcuucuuccuccucacccgcauccucaccaucccccagucccucgacuccugguggaccucccucaacuuccucggcggcucccccgucugccucggccagaacucccagucccccaccuccaaccacucccccaccuccugcccccccaucugccccggcuaccgcuggaugugccuccgccgcuucaucaucuuccucuucauccuccuccucugccucaucuuccuccucguccuccucgacuaccagggcaugcuccccgucugcccccucauccccggcuccaccaccaccaacaccggccccugcaagaccugcaccacccccgcccagggcaacuccauguuccccuccugcugcugcaccaagcccaccgacggcaacugcaccugcauccccauccccuccuccugggccuucgccaaguaccucugggagugggccuccguccgcuucuccuggcucucccuccucguccccuucguccagugguucgucggccucucccccaccgucuggcucuccgccaucuggaugaugugguacuggggccccucccucuacuccaucgucucccccuucaucccccuccuccccaucuucuucugccucugggucuacaucugaggacuagucccuguucccagagcccacuuuuuuuucuuuuuuugaaauaaaauagccugucuuucagaucuaaaaaaaaaaaaaaaaaaaaaaaaaaaaaaaaaaaaaaaaaaaaaaaaaaaaaaaaaaaaaaaaugcaucccccccccccccccccccccccccccccccaaaggcucuuuucagagccaccagaauu

SEQ ID NO: 8991 - RNA, 2218 nt, Artificial Sequence
  mRNA Design a-3 (A64-N5-C30-hSL-N5) comprising derived and/or modified sequence from Pf(3D7)__XP_001351122.1__HsALB_Pf-CSP(19-384)_L(PVTN)_HBsAg (opt2)
aggagagggcgcuuggcuugcaaggacccugagcugcggcauugaagcacacccaacccaacucgacugaagucagccucacugaaccggaucugagaaucuucucucucugggcuugccagggcucuccgaaccuagcuagcauccucuucaauuccaacuagaaagcuuaccaugaagugggucaccuucaucucccuccucuuccucuucuccuccgccuacucccucuuccaggaguaccagugcuacggcuccuccuccaacacccgcguccucaacgagcucaacuacgacaacgccggcaccaaccucuacaacgagcucgagaugaacuacuacggcaagcaggagaacugguacucccucaagaagaacucccgcucccucggcgagaacgacgacggcaacaacgaggacaacgagaagcuccgcaagcccaagcacaagaagcucaagcagcccgccgacggcaaccccgaccccaacgccaaccccaacgucgaccccaacgccaaccccaacgucgaccccaacgccaaccccaacgucgaccccaacgccaaccccaacgccaaccccaacgccaaccccaacgccaaccccaacgccaaccccaacgccaaccccaacgccaaccccaacgccaaccccaacgccaaccccaacgccaaccccaacgccaaccccaacgccaaccccaacgccaaccccaacgccaaccccaacgccaaccccaacgccaaccccaacgccaaccccaacgucgaccccaacgccaaccccaacgccaaccccaacgccaaccccaacgccaaccccaacgccaaccccaacgccaaccccaacgccaaccccaacgccaaccccaacgccaaccccaacgccaaccccaacgccaaccccaacgccaaccccaacgccaaccccaacgccaaccccaacgccaaccccaacgccaaccccaacgccaaccccaacgccaaccccaacaagaacaaccagggcaacggccagggccacaacaugcccaacgaccccaaccgcaacgucgacgagaacgccaacgccaacuccgccgucaagaacaacaacaacgaggagcccuccgacaagcacaucaaggaguaccucaacaagauccagaacucccucuccaccgaguggucccccugcuccgucaccugcggcaacggcauccagguccgcaucaagcccggcuccgccaacaagcccaaggacgagcucgacuacgccaacgacaucgagaagaagaucugcaagauggagaagugcuccuccgucuucaacgucgucaacuccucccccgucaccaacauggagaacaucaccuccggcuuccucggcccccuccucguccuccaggccggcuucuuccuccucacccgcauccucaccaucccccagucccucgacuccugguggaccucccucaacuuccucggcggcucccccgucugccucggccagaacucccagucccccaccuccaaccacucccccaccuccugcccccccaucugccccggcuaccgcuggaugugccuccgccgcuucaucaucuuccucuucauccuccuccucugccucaucuuccuccucguccuccucgacuaccagggcaugcuccccgucugcccccucauccccggcuccaccaccaccaacaccggccccugcaagaccugcaccacccccgcccagggcaacuccauguuccccuccugcugcugcaccaagcccaccgacggcaacugcaccugcauccccauccccuccuccugggccuucgccaaguaccucugggagugggccuccguccgcuucuccuggcucucccuccucguccccuucguccagugguucgucggccucucccccaccgucuggcucuccgccaucuggaugaugugguacuggggccccucccucuacuccaucgucucccccuucaucccccuccuccccaucuucuucugccucugggucuacaucugaggacuagucccuguucccagagcccacuuuuuuuucuuuuuuugaaauaaaauagccugucuuucagaucuaaaaaaaaaaaaaaaaaaaaaaaaaaaaaaaaaaaaaaaaaaaaaaaaaaaaaaaaaaaaaaaaugcaucccccccccccccccccccccccccccccccaaaggcucuuuucagagccaccagaauu

SEQ ID NO: 8992 - RNA, 2035 nt, Artificial Sequence
  mRNA Design a-3 (A64-N5-C30-hSL-N5) comprising derived and/or modified sequence from Pf(3D7)__XP_001351122.1__HsALB_Pf-CSP(19-384)_L(SGG)_Ferritin (opt2)
aggagagggcgcuuggcuugcaaggacccugagcugcggcauugaagcacacccaacccaacucgacugaagucagccucacugaaccggaucugagaaucuucucucucugggcuugccagggcucuccgaaccuagcuagcauccucuucaauuccaacuagaaagcuuaccaugaagugggucaccuucaucucccuccucuuccucuucuccuccgccuacucccucuuccaggaguaccagugcuacggcuccuccuccaacacccgcguccucaacgagcucaacuacgacaacgccggcaccaaccucuacaacgagcucgagaugaacuacuacggcaagcaggagaacugguacucccucaagaagaacucccgcucccucggcgagaacgacgacggcaacaacgaggacaacgagaagcuccgcaagcccaagcacaagaagcucaagcagcccgccgacggcaaccccgaccccaacgccaaccccaacgucgaccccaacgccaaccccaacgucgaccccaacgccaaccccaacgucgaccccaacgccaaccccaacgccaaccccaacgccaaccccaacgccaaccccaacgccaaccccaacgccaaccccaacgccaaccccaacgccaaccccaacgccaaccccaacgccaaccccaacgccaaccccaacgccaaccccaacgccaaccccaacgccaaccccaacgccaaccccaacgccaaccccaacgccaaccccaacgucgaccccaacgccaaccccaacgccaaccccaacgccaaccccaacgccaaccccaacgccaaccccaacgccaaccccaacgccaaccccaacgccaaccccaacgccaaccccaacgccaaccccaacgccaaccccaacgccaaccccaacgccaaccccaacgccaaccccaacgccaaccccaacgccaaccccaacgccaaccccaacgccaaccccaacaagaacaaccagggcaacggccagggccacaacaugcccaacgaccccaaccgcaacgucgacgagaacgccaacgccaacuccgccgucaagaacaacaacaacgaggagcccuccgacaagcacaucaaggaguaccucaacaagauccagaacucccucuccaccgaguggucccccugcuccgucaccugcggcaacggcauccagguccgcaucaagcccggcuccgccaacaagcccaaggacgagcucgacuacgccaacgacaucgagaagaagaucugcaagauggagaagugcuccuccgucuucaacgucgucaacuccuccuccggcggccucuccaaggacaucaucaagcuccucaacgagcaggucaacaaggagaugaacuccuccaaccucuacauguccauguccuccuggugcuacacccacucccucgacggcgccggccucuuccucuucgaccacgccgccgaggaguacgagcacgccaagaagcucaucaucuuccucaacgagaacaacguccccguccagcucaccuccaucuccgcccccgagcacaaguucgagggccucacccagaucuuccagaaggccuacgagcacgagcagcacaucuccgaguccaucaacaacaucgucgaccacgccaucaaguccaaggaccacgccaccuucaacuuccuccagugguacgucgccgagcagcacgaggaggagguccucuucaaggacauccucgacaagaucgagcucaucggcaacgagaaccacggccucuaccucgccgaccaguacgucaagggcaucgccaagucccgcaaguccugaggacuagucccuguucccagagcccacuuuuuuuucuuuuuuugaaauaaaauagccugucuuucagaucuaaaaaaaaaaaaaaaaaaaaaaaaaaaaaaaaaaaaaaaaaaaaaaaaaaaaaaaaaaaaaaaaugcaucccccccccccccccccccccccccccccccaaaggcucuuuucagagccaccagaauu

SEQ ID NO: 8993 - RNA, 1996 nt, Artificial Sequence
  mRNA Design a-3 (A64-N5-C30-hSL-N5) comprising derived and/or modified sequence from Pf(3D7)__XP_001351122.1__HsALB_Pf-CSP(93-384)_L(PVTN)_HBsAg (opt2)
aggagagggcgcuuggcuugcaaggacccugagcugcggcauugaagcacacccaacccaacucgacugaagucagccucacugaaccggaucugagaaucuucucucucugggcuugccagggcucuccgaaccuagcuagcauccucuucaauuccaacuagaaagcuuaccaugaagugggucaccuucaucucccuccucuuccucuucuccuccgccuacuccaagcucaagcagcccgccgacggcaaccccgaccccaacgccaaccccaacgucgaccccaacgccaaccccaacgucgaccccaacgccaaccccaacgucgaccccaacgccaaccccaacgccaaccccaacgccaaccccaacgccaaccccaacgccaaccccaacgccaaccccaacgccaaccccaacgccaaccccaacgccaaccccaacgccaaccccaacgccaaccccaacgccaaccccaacgccaaccccaacgccaaccccaacgccaaccccaacgccaaccccaacgccaaccccaacgucgaccccaacgccaaccccaacgccaaccccaacgccaaccccaacgccaaccccaacgccaaccccaacgccaaccccaacgccaaccccaacgccaaccccaacgccaaccccaacgccaaccccaacgccaaccccaacgccaaccccaacgccaaccccaacgccaaccccaacgccaaccccaacgccaaccccaacgccaaccccaacgccaaccccaacaagaacaaccagggcaacggccagggccacaacaugcccaacgaccccaaccgcaacgucgacgagaacgccaacgccaacuccgccgucaagaacaacaacaacgaggagcccuccgacaagcacaucaaggaguaccucaacaagauccagaacucccucuccaccgaguggucccccugcuccgucaccugcggcaacggcauccagguccgcaucaagcccggcuccgccaacaagcccaaggacgagcucgacuacgccaacgacaucgagaagaagaucugcaagauggagaagugcuccuccgucuucaacgucgucaacuccucccccgucaccaacauggagaacaucaccuccggcuuccucggcccccuccucguccuccaggccggcuucuuccuccucacccgcauccucaccaucccccagucccucgacuccugguggaccucccucaacuuccucggcggcucccccgucugccucggccagaacucccagucccccaccuccaaccacucccccaccuccugcccccccaucugccccggcuaccgcuggaugugccuccgccgcuucaucaucuuccucuucauccuccuccucugccucaucuuccuccucguccuccucgacuaccagggcaugcuccccgucugcccccucauccccggcuccaccaccaccaacaccggccccugcaagaccugcaccacccccgcccagggcaacuccauguuccccuccugcugcugcaccaagcccaccgacggcaacugcaccugcauccccauccccuccuccugggccuucgccaaguaccucugggagugggccuccguccgcuucuccuggcucucccuccucguccccuucguccagugguucgucggccucucccccaccgucuggcucuccgccaucuggaugaugugguacuggggccccucccucuacuccaucgucucccccuucaucccccuccuccccaucuucuucugccucugggucuacaucugaggacuagucccuguucccagagcccacuuuuuuuucuuuuuuugaaauaaaauagccugucuuucagaucuaaaaaaaaaaaaaaaaaaaaaaaaaaaaaaaaaaaaaaaaaaaaaaaaaaaaaaaaaaaaaaaaugcaucccccccccccccccccccccccccccccccaaaggcucuuuucagagccaccagaauu

SEQ ID NO: 8994 - RNA, 1657 nt, Artificial Sequence; identical to SEQ ID NO: 6404
  mRNA Design a-3 (A64-N5-C30-hSL-N5) comprising derived and/or modified sequence from Pf(3D7)__XP_001351122.1__HsALB_Pf-CSP(199-377)_L(PVTN)_HBsAg (opt2)

SEQ ID NO: 8995 - RNA, 1354 nt, Artificial Sequence
  mRNA Design a-3 (A64-N5-C30-hSL-N5) comprising derived and/or modified sequence from Pf(3D7)__XP_001351122.1__HsALB_Pf-CSP(19-272)_L(AAY)_Pf-CSP(346-3 75)_L(AAY)_Pf-CSP(310-327) (opt2)
aggagagggcgcuuggcuugcaaggacccugagcugcggcauugaagcacacccaacccaacucgacugaagucagccucacugaaccggaucugagaaucuucucucucugggcuugccagggcucuccgaaccuagcuagcauccucuucaauuccaacuagaaagcuuaccaugaagugggucaccuucaucucccuccucuuccucuucuccuccgccuacucccucuuccaggaguaccagugcuacggcuccuccuccaacacccgcguccucaacgagcucaacuacgacaacgccggcaccaaccucuacaacgagcucgagaugaacuacuacggcaagcaggagaacugguacucccucaagaagaacucccgcucccucggcgagaacgacgacggcaacaacgaggacaacgagaagcuccgcaagcccaagcacaagaagcucaagcagcccgccgacggcaaccccgaccccaacgccaaccccaacgucgaccccaacgccaaccccaacgucgaccccaacgccaaccccaacgucgaccccaacgccaaccccaacgccaaccccaacgccaaccccaacgccaaccccaacgccaaccccaacgccaaccccaacgccaaccccaacgccaaccccaacgccaaccccaacgccaaccccaacgccaaccccaacgccaaccccaacgccaaccccaacgccaaccccaacgccaaccccaacgccaaccccaacgccaaccccaacgucgaccccaacgccaaccccaacgccaaccccaacgccaaccccaacgccaaccccaacgccaaccccaacgccaaccccaacgccaaccccaacgccaaccccaacgccaaccccaacgccaaccccaacgccaaccccaacgccaaccccaacgccaaccccaacgccaaccccaacgccaaccccaacgccaaccccaacgccaaccccaacgccaaccccgccgccuacaucaagcccggcuccgccaacaagcccaaggacgagcucgacuacgccaacgacaucgagaagaagaucugcaagauggagaagugcuccgccgccuacgagcccuccgacaagcacaucaaggaguaccucaacaagauccagaacucccucugaggacuagucccuguucccagagcccacuuuuuuuucuuuuuuugaaauaaaauagccugucuuucagaucuaaaaaaaaaaaaaaaaaaaaaaaaaaaaaaaaaaaaaaaaaaaaaaaaaaaaaaaaaaaaaaaaugcaucccccccccccccccccccccccccccccccaaaggcucuuuucagagccaccagaauu

SEQ ID NO: 8996 - RNA, 1402 nt, Artificial Sequence
  mRNA Design a-3 (A64-N5-C30-hSL-N5) comprising derived and/or modified sequence from Pf(3D7)__XP_001351122.1__HsALB_Pf-CSP(19-272)_L(AAY)_Pf-CSP(346-3 75)_L(AAY)_Pf-CSP(310-327)_L(AAY)_PADRE (opt2)
aggagagggcgcuuggcuugcaaggacccugagcugcggcauugaagcacacccaacccaacucgacugaagucagccucacugaaccggaucugagaaucuucucucucugggcuugccagggcucuccgaaccuagcuagcauccucuucaauuccaacuagaaagcuuaccaugaagugggucaccuucaucucccuccucuuccucuucuccuccgccuacucccucuuccaggaguaccagugcuacggcuccuccuccaacacccgcguccucaacgagcucaacuacgacaacgccggcaccaaccucuacaacgagcucgagaugaacuacuacggcaagcaggagaacugguacucccucaagaagaacucccgcucccucggcgagaacgacgacggcaacaacgaggacaacgagaagcuccgcaagcccaagcacaagaagcucaagcagcccgccgacggcaaccccgaccccaacgccaaccccaacgucgaccccaacgccaaccccaacgucgaccccaacgccaaccccaacgucgaccccaacgccaaccccaacgccaaccccaacgccaaccccaacgccaaccccaacgccaaccccaacgccaaccccaacgccaaccccaacgccaaccccaacgccaaccccaacgccaaccccaacgccaaccccaacgccaaccccaacgccaaccccaacgccaaccccaacgccaaccccaacgccaaccccaacgccaaccccaacgucgaccccaacgccaaccccaacgccaaccccaacgccaaccccaacgccaaccccaacgccaaccccaacgccaaccccaacgccaaccccaacgccaaccccaacgccaaccccaacgccaaccccaacgccaaccccaacgccaaccccaacgccaaccccaacgccaaccccaacgccaaccccaacgccaaccccaacgccaaccccaacgccaaccccgccgccuacaucaagcccggcuccgccaacaagcccaaggacgagcucgacuacgccaacgacaucgagaagaagaucugcaagauggagaagugcuccgccgccuacgagcccuccgacaagcacaucaaggaguaccucaacaagauccagaacucccucgccgccuacgccaaguucgucgccgccuggacccucaaggccgccgccugaggacuagucccuguucccagagcccacuuuuuuuucuuuuuuugaaauaaaauagccugucuuucagaucuaaaaaaaaaaaaaaaaaaaaaaaaaaaaaaaaaaaaaaaaaaaaaaaaaaaaaaaaaaaaaaaaugcaucccccccccccccccccccccccccccccccaaaggcucuuuucagagccaccagaauu

SEQ ID NO: 8997 - RNA, 1402 nt, Artificial Sequence
  mRNA Design a-3 (A64-N5-C30-hSL-N5) comprising derived and/or modified sequence from Pf(3D7)__XP_001351122.1__HsALB_Pf-CSP(19-272)_L(AAY)_Pf-CSP(310-3 27)_L(AAY)_Pf-CSP(346-375)_L(AAY)_PADRE (opt2)
aggagagggcgcuuggcuugcaaggacccugagcugcggcauugaagcacacccaacccaacucgacugaagucagccucacugaaccggaucugagaaucuucucucucugggcuugccagggcucuccgaaccuagcuagcauccucuucaauuccaacuagaaagcuuaccaugaagugggucaccuucaucucccuccucuuccucuucuccuccgccuacucccucuuccaggaguaccagugcuacggcuccuccuccaacacccgcguccucaacgagcucaacuacgacaacgccggcaccaaccucuacaacgagcucgagaugaacuacuacggcaagcaggagaacugguacucccucaagaagaacucccgcucccucggcgagaacgacgacggcaacaacgaggacaacgagaagcuccgcaagcccaagcacaagaagcucaagcagcccgccgacggcaaccccgaccccaacgccaaccccaacgucgaccccaacgccaaccccaacgucgaccccaacgccaaccccaacgucgaccccaacgccaaccccaacgccaaccccaacgccaaccccaacgccaaccccaacgccaaccccaacgccaaccccaacgccaaccccaacgccaaccccaacgccaaccccaacgccaaccccaacgccaaccccaacgccaaccccaacgccaaccccaacgccaaccccaacgccaaccccaacgccaaccccaacgccaaccccaacgucgaccccaacgccaaccccaacgccaaccccaacgccaaccccaacgccaaccccaacgccaaccccaacgccaaccccaacgccaaccccaacgccaaccccaacgccaaccccaacgccaaccccaacgccaaccccaacgccaaccccaacgccaaccccaacgccaaccccaacgccaaccccaacgccaaccccaacgccaaccccaacgccaaccccgccgccuacgagcccuccgacaagcacaucaaggaguaccucaacaagauccagaacucccucgccgccuacaucaagcccggcuccgccaacaagcccaaggacgagcucgacuacgccaacgacaucgagaagaagaucugcaagauggagaagugcuccgccgccuacgccaaguucgucgccgccuggacccucaaggccgccgccugaggacuagucccuguucccagagcccacuuuuuuuucuuuuuuugaaauaaaauagccugucuuucagaucuaaaaaaaaaaaaaaaaaaaaaaaaaaaaaaaaaaaaaaaaaaaaaaaaaaaaaaaaaaaaaaaaugcaucccccccccccccccccccccccccccccccaaaggcucuuuucagagccaccagaauu

SEQ ID NO: 8998 - RNA, 1456 nt, Artificial Sequence
  mRNA Design a-3 (A64-N5-C30-hSL-N5) comprising derived and/or modified sequence from Pf(3D7)__XP_001351122.1__HsALB_Pf-CSP(19-272)_L(AAY)_Pf-CSP(310-3 27)_L(AAY)_Pf-CSP(346-375)_L(AAY)_PADRE_L(AAY)_P2 (opt2)
aggagagggcgcuuggcuugcaaggacccugagcugcggcauugaagcacacccaacccaacucgacugaagucagccucacugaaccggaucugagaaucuucucucucugggcuugccagggcucuccgaaccuagcuagcauccucuucaauuccaacuagaaagcuuaccaugaagugggucaccuucaucucccuccucuuccucuucuccuccgccuacucccucuuccaggaguaccagugcuacggcuccuccuccaacacccgcguccucaacgagcucaacuacgacaacgccggcaccaaccucuacaacgagcucgagaugaacuacuacggcaagcaggagaacugguacucccucaagaagaacucccgcucccucggcgagaacgacgacggcaacaacgaggacaacgagaagcuccgcaagcccaagcacaagaagcucaagcagcccgccgacggcaaccccgaccccaacgccaaccccaacgucgaccccaacgccaaccccaacgucgaccccaacgccaaccccaacgucgaccccaacgccaaccccaacgccaaccccaacgccaaccccaacgccaaccccaacgccaaccccaacgccaaccccaacgccaaccccaacgccaaccccaacgccaaccccaacgccaaccccaacgccaaccccaacgccaaccccaacgccaaccccaacgccaaccccaacgccaaccccaacgccaaccccaacgccaaccccaacgucgaccccaacgccaaccccaacgccaaccccaacgccaaccccaacgccaaccccaacgccaaccccaacgccaaccccaacgccaaccccaacgccaaccccaacgccaaccccaacgccaaccccaacgccaaccccaacgccaaccccaacgccaaccccaacgccaaccccaacgccaaccccaacgccaaccccaacgccaaccccaacgccaaccccgccgccuacgagcccuccgacaagcacaucaaggaguaccucaacaagauccagaacucccucgccgccuacaucaagcccggcuccgccaacaagcccaaggacgagcucgacuacgccaacgacaucgagaagaagaucugcaagauggagaagugcuccgccgccuacgccaaguucgucgccgccuggacccucaaggccgccgccgccgccuaccaguacaucaaggccaacuccaaguucaucggcaucaccgagcucugaggacuagucccuguucccagagcccacuuuuuuuucuuuuuuugaaauaaaauagccugucuuucagaucuaaaaaaaaaaaaaaaaaaaaaaaaaaaaaaaaaaaaaaaaaaaaaaaaaaaaaaaaaaaaaaaaugcaucccccccccccccccccccccccccccccccaaaggcucuuuucagagccaccagaauu

SEQ ID NO: 8999 - RNA, 1420 nt, Artificial Sequence
  mRNA Design a-3 (A64-N5-C30-hSL-N5) comprising derived and/or modified sequence from Pf(3D7)__XP_001351122.1__HsALB_Pf-CSP(19-272)_L(AAY)_Pf-CSP(310-3 27)_Linker (AAY)_Pf-CSP(346-397) (opt2)
aggagagggcgcuuggcuugcaaggacccugagcugcggcauugaagcacacccaacccaacucgacugaagucagccucacugaaccggaucugagaaucuucucucucugggcuugccagggcucuccgaaccuagcuagcauccucuucaauuccaacuagaaagcuuaccaugaagugggucaccuucaucucccuccucuuccucuucuccuccgccuacucccucuuccaggaguaccagugcuacggcuccuccuccaacacccgcguccucaacgagcucaacuacgacaacgccggcaccaaccucuacaacgagcucgagaugaacuacuacggcaagcaggagaacugguacucccucaagaagaacucccgcucccucggcgagaacgacgacggcaacaacgaggacaacgagaagcuccgcaagcccaagcacaagaagcucaagcagcccgccgacggcaaccccgaccccaacgccaaccccaacgucgaccccaacgccaaccccaacgucgaccccaacgccaaccccaacgucgaccccaacgccaaccccaacgccaaccccaacgccaaccccaacgccaaccccaacgccaaccccaacgccaaccccaacgccaaccccaacgccaaccccaacgccaaccccaacgccaaccccaacgccaaccccaacgccaaccccaacgccaaccccaacgccaaccccaacgccaaccccaacgccaaccccaacgccaaccccaacgucgaccccaacgccaaccccaacgccaaccccaacgccaaccccaacgccaaccccaacgccaaccccaacgccaaccccaacgccaaccccaacgccaaccccaacgccaaccccaacgccaaccccaacgccaaccccaacgccaaccccaacgccaaccccaacgccaaccccaacgccaaccccaacgccaaccccaacgccaaccccaacgccaaccccgccgccuacgagcccuccgacaagcacaucaaggaguaccucaacaagauccagaacucccucgccgccuacaucaagcccggcuccgccaacaagcccaaggacgagcucgacuacgccaacgacaucgagaagaagaucugcaagauggagaagugcuccuccgucuucaacgucgucaacuccuccaucggccucaucaugguccucuccuuccucuuccucaacugaggacuagucccuguucccagagcccacuuuuuuuucuuuuuuugaaauaaaauagccugucuuucagaucuaaaaaaaaaaaaaaaaaaaaaaaaaaaaaaaaaaaaaaaaaaaaaaaaaaaaaaaaaaaaaaaaugcaucccccccccccccccccccccccccccccccaaaggcucuuuucagagccaccagaauu

SEQ ID NO: 9000 - RNA, 2020 nt, Artificial Sequence
  mRNA Design a-3 (A64-N5-C30-hSL-N5) comprising derived and/or modified sequence from Pf(3D7)__XP_001351122.1__LumSynt_L(GGS4-GGG)_Pf-CSP(19-397) (opt3)
aggagagggcgcuuggcuugcaaggacccugagcugcggcauugaagcacacccaacccaacucgacugaagucagccucacugaaccggaucugagaaucuucucucucugggcuugccagggcucuccgaaccuagcuagcauccucuucaauuccaacuagaaagcuuaccaugcagaucuacgagggcaagcugaccgccgaagggcucagauucggaauuguggcuagcagguuuaaccacgcacuugucgaccggcugguugagggugccauagaugcgaucgugcgccauggcgggcgagaagaggacauuacauugguacgugugcccggauccugggaaaucccugucgcugccggcgaguuagcaagaaaagaggauauugacgccgugaucgcuauagguguucugaucaggggagcaacuccacacuucgauuauauugccucugaagugucaaaggggcuagcugaccucagucuggagcuucggaaaccgaucacguuuggcgucauuaccgccgauacacuggaacaagcgaucgagcgcgcaggcacuaagcaugggaauaaaggaugggaggccgcuuugagcgccauagaaauggcaaaccucuucaagucccugagagguggcucugggggaucgggcgguucagggggaagcggcggcgggcuguuucaggaguaccagugcuauggaaguuccucuaauaccagggugcucaacgaauuaaauuacgacaacgcugguacaaaucuguauaacgagcuugaaaugaauuacuauggcaagcaggagaacugguacagcuugaaaaagaacucccggucacugggggagaaugaugacggaaauaacgaagauaaugagaaacuacgcaagcccaaacacaagaagcucaaacaaccugccgacggcaacccagaucccaacgcgaauccuaacguagacccaaaugccaaccccaauguugacccuaacgcaaauccaaacguggauccgaaugcuaaccccaaugccaacccuaaugcuaacccaaaugccaaccccaacgcaaauccuaacgccaauccaaacgcuaaucccaacgcgaauccgaacgcaaauccuaacgccaaucccaacgcuaauccaaacgccaauccuaacgcaaaccccaaugccaacccaaaugcuaaccccaaugccaacccuaaugcaaacccaaaugucgacccgaacgcgaaucccaacgcuaauccuaacgccaauccaaacgcaaaccccaaugccaacccuaaugcuaacccaaaugccaaccccaaugcaaacccgaaugcuaacccuaaugccaacccaaaugcgaaccccaaugccaacccuaaugcuaaccccaacgcaaauccaaacgccaauccuaacgcuaaucccaacgccaauccaaacgcaaauccgaacaagaauaaccaggguaaugggcagggccauaacaugccuaaugaucccaaccgaaacguggacgaaaaugcgaacgccaauagugcugugaaaaacaauaacaaugaggaaccaagcgauaagcacauuaaagaguaccugaacaagauccaaaauucucuuuccaccgaguggucacccugcagcgucacuugcggaaacggcauucagguuagaaucaaaccugggagugccaauaagccaaaggacgaacuggauuaugcaaacgacaucgagaaaaagauuuguaaaauggaaaaguguucuuccguguucaauguagugaacagcucgauaggauugaucaugguccucucuuuucuguucuuaaauugaggacuagucccuguucccagagcccacuuuuuuuucuuuuuuugaaauaaaauagccugucuuucagaucuaaaaaaaaaaaaaaaaaaaaaaaaaaaaaaaaaaaaaaaaaaaaaaaaaaaaaaaaaaaaaaaaugcaucccccccccccccccccccccccccccccccaaaggcucuuuucagagccaccagaauu

SEQ ID NO: 9001 - RNA, 1882 nt, Artificial Sequence
  mRNA Design a-3 (A64-N5-C30-hSL-N5) comprising derived and/or modified sequence from Pf(3D7)__XP_001351122.1__HsALB_Pf-CSP(19-272)_L(PVTN)_HBsAg (opt3)
aggagagggcgcuuggcuugcaaggacccugagcugcggcauugaagcacacccaacccaacucgacugaagucagccucacugaaccggaucugagaaucuucucucucugggcuugccagggcucuccgaaccuagcuagcauccucuucaauuccaacuagaaagcuuaccaugaagugggugaccuucaucagccugcucuuucuuuucuccucugccuacucacuguuucaggaguaucaaugcuacggcaguagcuccaacacaagagucuugaaugaauuaaacuaugacaaugcugggacuaaccuguacaaugagcuagaaaugaacuauuacggaaaacaggagaauugguauucucucaagaaaaacucgaggucacugggugaaaaugaugacggcaacaaugaggauaacgagaaacuucggaagcccaagcacaagaaacugaagcagccugcagacgggaauccagauccgaacgccaaucccaacguugacccuaacgcgaauccaaacguggaucccaaugcuaacccuaauguagacccaaacgccaaucccaacgcaaauccuaacgccaauccaaacgcuaauccgaacgcaaaucccaacgccaacccuaaugcuaacccaaaugccaaccccaaugcgaacccuaaugcaaacccaaaugccaaccccaaugcuaacccgaaugccaacccuaaugcaaaccccaacgcuaauccaaacgccaauccuaacgcgaaucccaacguggauccaaaugccaaccccaaugcaaacccuaaugcuaacccaaaugccaacccgaaugcuaaccccaacgccaauccuaacgcaaauccaaacgccaaucccaacgcuaauccuaacgcgaauccaaacgcaaaucccaacgccaauccgaacgcuaauccuaacgccaauccaaacgcaaaccccaaugccaacccuaaugcuaaccccaaugccaacccaccugucacgaauauggaaaacauuaccagcggauucuugggcccccuccuggugcugcaggcaggguuuuuccucuuaacacgcauacugacuaucccacaaagucuugacuccugguggaccucuuugaauuuucuggguggaagcccgguuugucuaggccagaacucccagucaccuacaaguaaucauagccccaccucuugcccacccauuuguccuggcuaccgauggaugugccuccguagauucaucauuuuucuguucauccuucuguugugucucauauuucuguuagugcugcucgauuaccaggggaugcuuccagucugcccccugaucccuggauccacuacaaccaacacggguccguguaaaacuugcaccacaccagcgcaaggcaauucaauguuccccagcuguugcuguacuaagccuaccgacgggaacugcacaugcauuccaauccccaguucuugggcuuuugccaaauauuugugggagugggcauccgugagguucagcuggcuaucgcugcucguaccuuucguucagugguuugugggacugucuccgaccgucuggcuuuccgccauuuggaugaugugguacuggggccccucacuguauaguaucgugagcccauucauaccuuugcuccccaucuuuuucugucuguggguguacauuugaggacuagucccuguucccagagcccacuuuuuuuucuuuuuuugaaauaaaauagccugucuuucagaucuaaaaaaaaaaaaaaaaaaaaaaaaaaaaaaaaaaaaaaaaaaaaaaaaaaaaaaaaaaaaaaaaugcaucccccccccccccccccccccccccccccccaaaggcucuuuucagagccaccagaauu

SEQ ID NO: 9002 - RNA, 1999 nt, Artificial Sequence
  mRNA Design a-3 (A64-N5-C30-hSL-N5) comprising derived and/or modified sequence from Pf(3D7)__XP_001351122.1__HsALB_Pf-CSP(19-272)_L(AAY)_Pf-CSP(346-3 65)_L(AAY)_PADRE_L(PVTN)_HBsAg (opt3)
aggagagggcgcuuggcuugcaaggacccugagcugcggcauugaagcacacccaacccaacucgacugaagucagccucacugaaccggaucugagaaucuucucucucugggcuugccagggcucuccgaaccuagcuagcauccucuucaauuccaacuagaaagcuuaccaugaagugggugaccuucaucagccugcucuuucuuuucuccucugccuacucacuguuucaggaguaucaaugcuacggcaguagcuccaacacaagagucuugaaugaauuaaacuaugacaaugcugggacuaaccuguacaaugagcuagaaaugaacuauuacggaaaacaggagaauugguauucucucaagaaaaacucgaggucacugggugaaaaugaugacggcaacaaugaggauaacgagaaacuucggaagcccaagcacaagaaacugaagcagccugcagacgggaauccagauccgaacgccaaucccaacguugacccuaacgcgaauccaaacguggaucccaaugcuaacccuaauguagacccaaacgccaaucccaacgcaaauccuaacgccaauccaaacgcuaauccgaacgcaaaucccaacgccaacccuaaugcuaacccaaaugccaaccccaaugcgaacccuaaugcaaacccaaaugccaaccccaaugcuaacccgaaugccaacccuaaugcaaaccccaacgcuaauccaaacgccaauccuaacgcgaaucccaacguggauccaaaugccaaccccaaugcaaacccuaaugcuaacccaaaugccaacccgaaugcuaaccccaacgccaauccuaacgcaaauccaaacgccaaucccaacgcuaauccuaacgcgaauccaaacgcaaaucccaacgccaauccgaacgcuaauccuaacgccaauccaaacgcaaaccccaaugccaacccuaaugcuaaccccaaugccaacccagcagcguacauuaaaccuggaagcgcuaauaagcccaaagacgaauuggauuacgccaacgacauagaggcagccuaugcuaaguucgucgccgcauggacgcucaaggcugccgcgccagugaccaauauggaaaacaucacaaguggcuuucuggguccgcugcucguuuuacaggccggguucuuucugcuuacucgcauuuugaccaucccucaaucccuggauucuugguggacaagccuaaauuuccucggaggcucccccgugugucugggccagaacucacagaguccaaccagcaaucauucucccacuuccugcccuccaauuugucccggguaccgauggaugugccuucguagauuuaucauauuccuguuuaucuugcuccuguguuuaauuuuccugcucguccuucuggacuaucagggaauguugccugugugcccgcuaaucccagguucaacaaccacgaacacuggccccuguaaaaccugcacaacuccugcucaagggaauagcauguuuccaaguuguugcuguaccaagcccacagacggaaacuguaccugcauuccuaucccgucuuccugggcauucgccaaauaccugugggagugggcuagcguaagguucucguggcucucucugcuuguucccuuugugcagugguucgucggccuguccccaacggugugguugucagccauauggaugaugugguauugggguccuagucucuacagcauugugucccccuuuaucccacuguuaccuauuuucuuuugccugugggucuauaucugaggacuagucccuguucccagagcccacuuuuuuuucuuuuuuugaaauaaaauagccugucuuucagaucuaaaaaaaaaaaaaaaaaaaaaaaaaaaaaaaaaaaaaaaaaaaaaaaaaaaaaaaaaaaaaaaaugcaucccccccccccccccccccccccccccccccaaaggcucuuuucagagccaccagaauu

SEQ ID NO: 9003 - RNA, 2218 nt, Artificial Sequence
  mRNA Design a-3 (A64-N5-C30-hSL-N5) comprising derived and/or modified sequence from Pf(3D7)__XP_001351122.1__HsALB_Pf-CSP(19-384)_L(PVTN)_HBsAg (opt3)
aggagagggcgcuuggcuugcaaggacccugagcugcggcauugaagcacacccaacccaacucgacugaagucagccucacugaaccggaucugagaaucuucucucucugggcuugccagggcucuccgaaccuagcuagcauccucuucaauuccaacuagaaagcuuaccaugaagugggugaccuucaucagccugcucuuucuuuucuccucugccuacucacuguuucaggaguaucaaugcuacggcaguagcuccaacacaagagucuugaaugaauuaaacuaugacaaugcugggacuaaccuguacaaugagcuagaaaugaacuauuacggaaaacaggagaauugguauucucucaagaaaaacucgaggucacugggugaaaaugaugacggcaacaaugaggauaacgagaaacuucggaagcccaagcacaagaaacugaagcagccugcagacgggaauccagauccgaacgccaaucccaacguugacccuaacgcgaauccaaacguggaucccaaugcuaacccuaauguagacccaaacgccaaucccaacgcaaauccuaacgccaauccaaacgcuaauccgaacgcaaaucccaacgccaacccuaaugcuaacccaaaugccaaccccaaugcgaacccuaaugcaaacccaaaugccaaccccaaugcuaacccgaaugccaacccuaaugcaaaccccaacgcuaauccaaacgccaauccuaacgcgaaucccaacguggauccaaaugccaaccccaaugcaaacccuaaugcuaacccaaaugccaacccgaaugcuaaccccaacgccaauccuaacgcaaauccaaacgccaaucccaacgcuaauccuaacgcgaauccaaacgcaaaucccaacgccaauccgaacgcuaauccuaacgccaauccaaacgcaaaccccaaugccaacccuaaugcuaaccccaaugccaacccaaauaaaaacaaucagggaaacggccaaggucauaauaugccuaacgaccccaaucgcaacgucgaugaaaaugcaaacgcgaacagcgcugugaagaauaacaauaacgaggaaccaagugacaaacacauuaaggaguacuugaauaagauacagaacucccucucuacggaguggagcccguguuccguuaccugcgggaauggaauccaggugcgaauuaaaccuggcucagccaacaagcccaaagaugaacuggacuacgcaaaugacaucgagaagaaaauuuguaagauggaaaaaugcaguagcgucuucaacgugguaaauucuuccccaguuacaaacauggagaauaucacuucaggcuuucuggggccccucuuagugcugcaggccggauucuuucuuuugacccguauacugacaaucccucaaagccuagauaguugguggaccucucucaacuuccuggguggcuccccagucugucuugggcagaauagccagucgcccacuucuaaccauuccccuacaucaugcccgccaauuugucccggauauagauggaugugccugaggcgguuuaucauuuucuuguuuauccuccuguuaugucugauauuccuccuugugcuguuggacuaccagggcaugcuaccugugugcccacugauucccgguaguaccacgacuaacaccgggccuuguaagacaugcacuaccccggcucaaggaaauagcauguuucccuccugcuguugcacaaagccaaccgauggcaacuguacgugcaucccuauucccucuagcugggccuucgcaaaauaucucugggaaugggcuucaguccgcuucaguuggcugucccuucugguuccauuugugcagugguucguaggcuugagcccuacuguguggcucucugccaucuggaugaugugguacugggggcccucacuguauaguaucgucagcccauuuauuccguuacugccuauauucuuuugucuauggguguacaucugaggacuagucccuguucccagagcccacuuuuuuuucuuuuuuugaaauaaaauagccugucuuucagaucuaaaaaaaaaaaaaaaaaaaaaaaaaaaaaaaaaaaaaaaaaaaaaaaaaaaaaaaaaaaaaaaaugcaucccccccccccccccccccccccccccccccaaaggcucuuuucagagccaccagaauu

SEQ ID NO: 9004 - RNA, 2035 nt, Artificial Sequence
  mRNA Design a-3 (A64-N5-C30-hSL-N5) comprising derived and/or modified sequence from Pf(3D7)__XP_001351122.1__HsALB_Pf-CSP(19-384)_L(SGG)_Ferritin (opt3)
aggagagggcgcuuggcuugcaaggacccugagcugcggcauugaagcacacccaacccaacucgacugaagucagccucacugaaccggaucugagaaucuucucucucugggcuugccagggcucuccgaaccuagcuagcauccucuucaauuccaacuagaaagcuuaccaugaagugggugaccuucaucagccugcucuuucuuuucuccucugccuacucacuguuucaggaguaucaaugcuacggcaguagcuccaacacaagagucuugaaugaauuaaacuaugacaaugcugggacuaaccuguacaaugagcuagaaaugaacuauuacggaaaacaggagaauugguauucucucaagaaaaacucgaggucacugggugaaaaugaugacggcaacaaugaggauaacgagaaacuucggaagcccaagcacaagaaacugaagcagccugcagacgggaauccagauccgaacgccaaucccaacguugacccuaacgcgaauccaaacguggaucccaaugcuaacccuaauguagacccaaacgccaaucccaacgcaaauccuaacgccaauccaaacgcuaauccgaacgcaaaucccaacgccaacccuaaugcuaacccaaaugccaaccccaaugcgaacccuaaugcaaacccaaaugccaaccccaaugcuaacccgaaugccaacccuaaugcaaaccccaacgcuaauccaaacgccaauccuaacgcgaaucccaacguggauccaaaugccaaccccaaugcaaacccuaaugcuaacccaaaugccaacccgaaugcuaaccccaacgccaauccuaacgcaaauccaaacgccaaucccaacgcuaauccuaacgcgaauccaaacgcaaaucccaacgccaauccgaacgcuaauccuaacgccaauccaaacgcaaaccccaaugccaacccuaaugcuaaccccaaugccaacccaaauaaaaacaaucagggaaacggccaaggucauaauaugccuaacgaccccaaucgcaacgucgaugaaaaugcaaacgcgaacagcgcugugaagaauaacaauaacgaggaaccaagugacaaacacauuaaggaguacuugaauaagauacagaacucccucucuacggaguggagcccguguuccguuaccugcgggaauggaauccaggugcgaauuaaaccuggcucagccaacaagcccaaagaugaacuggacuacgcaaaugacaucgagaagaaaauuuguaagauggaaaaaugcaguagcgucuucaacgugguaaauucuuccucaggcgggcugagcaaggauaucauaaagcucuuaaacgagcagguuaauaaagaaaugaacaguucuaaucuguauauguccaugagcucgugguguuacacacauucucuugacggagccgguuuguuucuguucgaucacgcugccgaggaguaugaacaugcaaagaaacuaaucauuuuucucaacgagaacaaugugccaguccaacugacuuccaucucagcucccgaacacaaguucgagggccuuacccagauuuuucagaaagccuacgaacacgagcagcauaucagugagagcauaaacaauauuguggaccacgcgaucaaguccaaggaucaugccacauucaacuuucugcaaugguauguggcugaacagcacgaggaagaggucuuguucaaagacauucucgauaagaucgaacugaucgggaaugagaaccacggauuauaccuggcagaccaguauguuaaaggcauugccaagucucguaaaagcugaggacuagucccuguucccagagcccacuuuuuuuucuuuuuuugaaauaaaauagccugucuuucagaucuaaaaaaaaaaaaaaaaaaaaaaaaaaaaaaaaaaaaaaaaaaaaaaaaaaaaaaaaaaaaaaaaugcaucccccccccccccccccccccccccccccccaaaggcucuuuucagagccaccagaauu

SEQ ID NO: 9005 - RNA, 1996 nt, Artificial Sequence
  mRNA Design a-3 (A64-N5-C30-hSL-N5) comprising derived and/or modified sequence from Pf(3D7)__XP_001351122.1__HsALB_Pf-CSP(93-384)_L(PVTN)_HBsAg (opt3)
aggagagggcgcuuggcuugcaaggacccugagcugcggcauugaagcacacccaacccaacucgacugaagucagccucacugaaccggaucugagaaucuucucucucugggcuugccagggcucuccgaaccuagcuagcauccucuucaauuccaacuagaaagcuuaccaugaagugggugaccuucaucagccugcucuuucuuuucuccucugccuacucaaaacugaagcagcccgcugacggcaacccugauccaaaugcaaacccgaaugucgaccccaacgccaauccuaacguugauccaaaugcgaaccccaauguggacccuaacgcuaauccaaacgccaaucccaacgcaaauccuaacgccaacccaaaugcuaacccgaaugcaaaccccaaugccaacccuaaugcuaacccaaaugccaaccccaaugcgaacccuaaugcaaacccaaaugccaaccccaacgcuaauccgaacgccaauccuaacgcaaaucccaacgcuaauccaaacgccaauccuaacguagaucccaaugcgaacccaaaugccaaccccaaugcaaacccuaacgcuaauccaaacgccaauccgaacgcuaaucccaacgccaauccuaacgcaaauccaaacgccaaucccaacgcuaauccuaacgcgaauccaaacgcaaaccccaaugccaacccgaaugcuaacccuaaugccaacccaaaugcaaaccccaaugccaacccuaaugcuaaccccaauaaaaacaaucaagggaacggacagggucacaauaugccaaacgacccuaacagaaauguggaugagaacgccaaugcaaacagugcggucaagaauaacaauaacgaggaacccagcgacaaacauauuaaggaauauuugaauaagauacagaacuccuuaucuacagaguggucgccaugcucagugacuuguggcaaugggauccagguuaggauuaaaccgggaagcgcuaacaagccuaaagaugaacuggacuacgccaaugauaucgagaagaaaauuugcaagauggagaaguguaguuccguguuuaacgucguaaauucuagccccgugacgaacauggaaaacaucaccuccggcuuccuagguccacuccugguucuucaagcaggguuuuuccuguugacacggauacucacuaucccccagucacuggacaguugguggaccagccugaauuuucucggaggcucuccugugugcuuaggccagaacucccagucaccaacaagcaaucacagucccaccucuuguccuccgauuugcccaggguaucgcuggaugugucugcgacguuucaucauuuuucuuuucaucuugcugcuaugccucauauuucugcuuguccuguuggauuaccaaggaaugcuccccguguguccucugauuccagguuccacuacaaccaacacgggccccugcaaaacuuguaccacuccugcccaggggaauagcauguucccgucgugcugcuguacaaagcccaccgacggaaacugcacauguaucccaauuccuucuuccugggcuuuugccaaauauuuaugggagugggcaucagugagauucaguuggcugagccuccuuguccccuucguucagugguuugugggccuguccccaaccguaugguugucugcuaucuggaugaugugguacugggguccuagccuauauucaaucgugagucccuucauuccacugcucccgauauuuuucugccugugggucuacaucugaggacuagucccuguucccagagcccacuuuuuuuucuuuuuuugaaauaaaauagccugucuuucagaucuaaaaaaaaaaaaaaaaaaaaaaaaaaaaaaaaaaaaaaaaaaaaaaaaaaaaaaaaaaaaaaaaugcaucccccccccccccccccccccccccccccccaaaggcucuuuucagagccaccagaauu

SEQ ID NO: 9006 - RNA, 1657 nt, Artificial Sequence; identical to SEQ ID NO: 6434
  mRNA Design a-3 (A64-N5-C30-hSL-N5) comprising derived and/or modified sequence from Pf(3D7)__XP_001351122.1__HsALB_Pf-CSP(199-377)_L(PVTN)_HBsAg (opt3)

SEQ ID NO: 9007 - RNA, 1354 nt, Artificial Sequence
  mRNA Design a-3 (A64-N5-C30-hSL-N5) comprising derived and/or modified sequence from Pf(3D7)__XP_001351122.1__HsALB_Pf-CSP(19-272)_L(AAY)_Pf-CSP(346-3 75)_L(AAY)_Pf-CSP(310-327) (opt3)
aggagagggcgcuuggcuugcaaggacccugagcugcggcauugaagcacacccaacccaacucgacugaagucagccucacugaaccggaucugagaaucuucucucucugggcuugccagggcucuccgaaccuagcuagcauccucuucaauuccaacuagaaagcuuaccaugaagugggugaccuucaucagccugcucuuucuuuucuccucugccuacucacuguuucaggaguaucaaugcuacggcaguagcuccaacacaagagucuugaaugaauuaaacuaugacaaugcugggacuaaccuguacaaugagcuagaaaugaacuauuacggaaaacaggagaauugguauucucucaagaaaaacucgaggucacugggugaaaaugaugacggcaacaaugaggauaacgagaaacuucggaagcccaagcacaagaaacugaagcagccugcagacgggaauccagauccgaacgccaaucccaacguugacccuaacgcgaauccaaacguggaucccaaugcuaacccuaauguagacccaaacgccaaucccaacgcaaauccuaacgccaauccaaacgcuaauccgaacgcaaaucccaacgccaacccuaaugcuaacccaaaugccaaccccaaugcgaacccuaaugcaaacccaaaugccaaccccaaugcuaacccgaaugccaacccuaaugcaaaccccaacgcuaauccaaacgccaauccuaacgcgaaucccaacguggauccaaaugccaaccccaaugcaaacccuaaugcuaacccaaaugccaacccgaaugcuaaccccaacgccaauccuaacgcaaauccaaacgccaaucccaacgcuaauccuaacgcgaauccaaacgcaaaucccaacgccaauccgaacgcuaauccuaacgccaauccaaacgcaaaccccaaugccaacccuaaugcuaaccccaaugccaacccagcagcguacauuaaaccuggaagcgcuaauaagcccaaagacgaauuggauuacgccaacgacauagagaagaagaucuguaaaauggaaaagugcagugcagccuaugagccauccgauaaacauauuaaggaguaccucaauaaaauccagaacucucugugaggacuagucccuguucccagagcccacuuuuuuuucuuuuuuugaaauaaaauagccugucuuucagaucuaaaaaaaaaaaaaaaaaaaaaaaaaaaaaaaaaaaaaaaaaaaaaaaaaaaaaaaaaaaaaaaaugcaucccccccccccccccccccccccccccccccaaaggcucuuuucagagccaccagaauu

SEQ ID NO: 9008 - RNA, 1402 nt, Artificial Sequence
  mRNA Design a-3 (A64-N5-C30-hSL-N5) comprising derived and/or modified sequence from Pf(3D7)__XP_001351122.1__HsALB_Pf-CSP(19-272)_L(AAY)_Pf-CSP(346-3 75)_L(AAY)_Pf-CSP(310-327)_L(AAY)_PADRE (opt3)
aggagagggcgcuuggcuugcaaggacccugagcugcggcauugaagcacacccaacccaacucgacugaagucagccucacugaaccggaucugagaaucuucucucucugggcuugccagggcucuccgaaccuagcuagcauccucuucaauuccaacuagaaagcuuaccaugaagugggugaccuucaucagccugcucuuucuuuucuccucugccuacucacuguuucaggaguaucaaugcuacggcaguagcuccaacacaagagucuugaaugaauuaaacuaugacaaugcugggacuaaccuguacaaugagcuagaaaugaacuauuacggaaaacaggagaauugguauucucucaagaaaaacucgaggucacugggugaaaaugaugacggcaacaaugaggauaacgagaaacuucggaagcccaagcacaagaaacugaagcagccugcagacgggaauccagauccgaacgccaaucccaacguugacccuaacgcgaauccaaacguggaucccaaugcuaacccuaauguagacccaaacgccaaucccaacgcaaauccuaacgccaauccaaacgcuaauccgaacgcaaaucccaacgccaacccuaaugcuaacccaaaugccaaccccaaugcgaacccuaaugcaaacccaaaugccaaccccaaugcuaacccgaaugccaacccuaaugcaaaccccaacgcuaauccaaacgccaauccuaacgcgaaucccaacguggauccaaaugccaaccccaaugcaaacccuaaugcuaacccaaaugccaacccgaaugcuaaccccaacgccaauccuaacgcaaauccaaacgccaaucccaacgcuaauccuaacgcgaauccaaacgcaaaucccaacgccaauccgaacgcuaauccuaacgccaauccaaacgcaaaccccaaugccaacccuaaugcuaaccccaaugccaacccagcagcguacauuaaaccuggaagcgcuaauaagcccaaagacgaauuggauuacgccaacgacauagagaagaagaucuguaaaauggaaaagugcagugcagccuaugagccauccgauaaacauauuaaggaguaccucaauaaaauccagaacucucuggcugccuaugcaaaguucgucgcugccuggacgcugaaagcggccgcuugaggacuagucccuguucccagagcccacuuuuuuuucuuuuuuugaaauaaaauagccugucuuucagaucuaaaaaaaaaaaaaaaaaaaaaaaaaaaaaaaaaaaaaaaaaaaaaaaaaaaaaaaaaaaaaaaaugcaucccccccccccccccccccccccccccccccaaaggcucuuuucagagccaccagaauu

SEQ ID NO: 9009 - RNA, 1402 nt, Artificial Sequence
  mRNA Design a-3 (A64-N5-C30-hSL-N5) comprising derived and/or modified sequence from Pf(3D7)__XP_001351122.1__HsALB_Pf-CSP(19-272)_L(AAY)_Pf-CSP(310-3 27)_L(AAY)_Pf-CSP(346-375)_L(AAY)_PADRE (opt3)
aggagagggcgcuuggcuugcaaggacccugagcugcggcauugaagcacacccaacccaacucgacugaagucagccucacugaaccggaucugagaaucuucucucucugggcuugccagggcucuccgaaccuagcuagcauccucuucaauuccaacuagaaagcuuaccaugaagugggugaccuucaucagccugcucuuucuuuucuccucugccuacucacuguuucaggaguaucaaugcuacggcaguagcuccaacacaagagucuugaaugaauuaaacuaugacaaugcugggacuaaccuguacaaugagcuagaaaugaacuauuacggaaaacaggagaauugguauucucucaagaaaaacucgaggucacugggugaaaaugaugacggcaacaaugaggauaacgagaaacuucggaagcccaagcacaagaaacugaagcagccugcagacgggaauccagauccgaacgccaaucccaacguugacccuaacgcgaauccaaacguggaucccaaugcuaacccuaauguagacccaaacgccaaucccaacgcaaauccuaacgccaauccaaacgcuaauccgaacgcaaaucccaacgccaacccuaaugcuaacccaaaugccaaccccaaugcgaacccuaaugcaaacccaaaugccaaccccaaugcuaacccgaaugccaacccuaaugcaaaccccaacgcuaauccaaacgccaauccuaacgcgaaucccaacguggauccaaaugccaaccccaaugcaaacccuaaugcuaacccaaaugccaacccgaaugcuaaccccaacgccaauccuaacgcaaauccaaacgccaaucccaacgcuaauccuaacgcgaauccaaacgcaaaucccaacgccaauccgaacgcuaauccuaacgccaauccaaacgcaaaccccaaugccaacccuaaugcuaaccccaaugccaacccagcagcguacgaaccuagcgacaaacauauuaaggaguacuugaauaaaauacagaacagucucgcugccuauaucaagcccggauccgcaaauaagccaaaagaugaacuggacuacgccaacgauauugagaagaaaaucuguaagauggagaaaugcucugcugccuaugcaaaguucgucgcugccuggacgcugaaagcggccgcuugaggacuagucccuguucccagagcccacuuuuuuuucuuuuuuugaaauaaaauagccugucuuucagaucuaaaaaaaaaaaaaaaaaaaaaaaaaaaaaaaaaaaaaaaaaaaaaaaaaaaaaaaaaaaaaaaaugcaucccccccccccccccccccccccccccccccaaaggcucuuuucagagccaccagaauu

SEQ ID NO: 9010 - RNA, 1456 nt, Artificial Sequence
  mRNA Design a-3 (A64-N5-C30-hSL-N5) comprising derived and/or modified sequence from Pf(3D7)__XP_001351122.1__HsALB_Pf-CSP(19-272)_L(AAY)_Pf-CSP(310-3 27)_L(AAY)_Pf-CSP(346-375)_L(AAY)_PADRE_L(AAY)_P2 (opt3)
aggagagggcgcuuggcuugcaaggacccugagcugcggcauugaagcacacccaacccaacucgacugaagucagccucacugaaccggaucugagaaucuucucucucugggcuugccagggcucuccgaaccuagcuagcauccucuucaauuccaacuagaaagcuuaccaugaagugggugaccuucaucagccugcucuuucuuuucuccucugccuacucacuguuucaggaguaucaaugcuacggcaguagcuccaacacaagagucuugaaugaauuaaacuaugacaaugcugggacuaaccuguacaaugagcuagaaaugaacuauuacggaaaacaggagaauugguauucucucaagaaaaacucgaggucacugggugaaaaugaugacggcaacaaugaggauaacgagaaacuucggaagcccaagcacaagaaacugaagcagccugcagacgggaauccagauccgaacgccaaucccaacguugacccuaacgcgaauccaaacguggaucccaaugcuaacccuaauguagacccaaacgccaaucccaacgcaaauccuaacgccaauccaaacgcuaauccgaacgcaaaucccaacgccaacccuaaugcuaacccaaaugccaaccccaaugcgaacccuaaugcaaacccaaaugccaaccccaaugcuaacccgaaugccaacccuaaugcaaaccccaacgcuaauccaaacgccaauccuaacgcgaaucccaacguggauccaaaugccaaccccaaugcaaacccuaaugcuaacccaaaugccaacccgaaugcuaaccccaacgccaauccuaacgcaaauccaaacgccaaucccaacgcuaauccuaacgcgaauccaaacgcaaaucccaacgccaauccgaacgcuaauccuaacgccaauccaaacgcaaaccccaaugccaacccuaaugcuaaccccaaugccaacccagcagcguacgaaccuagcgacaaacauauuaaggaguacuugaauaaaauacagaacagucucgcugccuauaucaagcccggauccgcaaauaagccaaaagaugaacuggacuacgccaacgauauugagaagaaaaucuguaagauggagaaaugcucugcugccuaugcaaaguucgucgcugccuggacgcugaaagcggccgcugcagccuaccaauauauuaaggcuaauagcaaguuuaucggcauaaccgaacucugaggacuagucccuguucccagagcccacuuuuuuuucuuuuuuugaaauaaaauagccugucuuucagaucuaaaaaaaaaaaaaaaaaaaaaaaaaaaaaaaaaaaaaaaaaaaaaaaaaaaaaaaaaaaaaaaaugcaucccccccccccccccccccccccccccccccaaaggcucuuuucagagccaccagaauu

SEQ ID NO: 9011 - RNA, 1420 nt, Artificial Sequence
  mRNA Design a-3 (A64-N5-C30-hSL-N5) comprising derived and/or modified sequence from Pf(3D7)__XP_001351122.1__HsALB_Pf-CSP(19-272)_L(AAY)_Pf-CSP(310-3 27)_Linker (AAY)_Pf-CSP(346-397) (opt3)
aggagagggcgcuuggcuugcaaggacccugagcugcggcauugaagcacacccaacccaacucgacugaagucagccucacugaaccggaucugagaaucuucucucucugggcuugccagggcucuccgaaccuagcuagcauccucuucaauuccaacuagaaagcuuaccaugaagugggugaccuucaucagccugcucuuucuuuucuccucugccuacucacuguuucaggaguaucaaugcuacggcaguagcuccaacacaagagucuugaaugaauuaaacuaugacaaugcugggacuaaccuguacaaugagcuagaaaugaacuauuacggaaaacaggagaauugguauucucucaagaaaaacucgaggucacugggugaaaaugaugacggcaacaaugaggauaacgagaaguuacggaaacccaagcacaagaaacugaagcagccugcagacgggaauccagauccgaacgccaaucccaacguugacccuaacgcgaauccaaacguggaucccaaugcuaacccuaauguagacccaaacgccaaucccaacgcaaauccuaacgccaauccaaacgcuaauccgaacgcaaaucccaacgccaacccuaaugcuaacccaaaugccaaccccaaugcgaacccuaaugcaaacccaaaugccaaccccaaugcuaacccgaaugccaacccuaaugcaaaccccaacgcuaauccaaacgccaauccuaacgcgaaucccaacguggauccaaaugccaaccccaaugcaaacccuaaugcuaacccaaaugccaacccgaaugcuaaccccaacgccaauccuaacgcaaauccaaacgccaaucccaacgcuaauccuaacgcgaauccaaacgcaaaucccaacgccaauccgaacgcuaauccuaacgccaauccaaacgcaaaccccaaugccaacccuaaugcuaaccccaaugccaacccagcagcguacgaaccuagcgacaaacauauuaaggaguacuugaauaaaauacagaacagucucgcugccuauaucaagcccggauccgcaaauaagccaaaagaugaacuggacuacgccaacgauauugagaagaaaaucuguaagauggagaaaugcucuagcgucuucaaugugguuaacuccucaauuggccugaucauggugcucaguuuucuuuuccugaauugaggacuagucccuguucccagagcccacuuuuuuuucuuuuuuugaaauaaaauagccugucuuucagaucuaaaaaaaaaaaaaaaaaaaaaaaaaaaaaaaaaaaaaaaaaaaaaaaaaaaaaaaaaaaaaaaaugcaucccccccccccccccccccccccccccccccaaaggcucuuuucagagccaccagaauu

SEQ ID NO: 9012 - RNA, 2020 nt, Artificial Sequence
  mRNA Design a-3 (A64-N5-C30-hSL-N5) comprising derived and/or modified sequence from Pf(3D7)__XP_001351122.1__LumSynt_L(GGS4-GGG)_Pf-CSP(19-397) (opt4)
aggagagggcgcuuggcuugcaaggacccugagcugcggcauugaagcacacccaacccaacucgacugaagucagccucacugaaccggaucugagaaucuucucucucugggcuugccagggcucuccgaaccuagcuagcauccucuucaauuccaacuagaaagcuuaccaugcagaucuacgagggcaagcugaccgccgagggccugagauucggcaucguggccagcagauucaaccacgcccugguggacagacugguggagggcgccaucgacgccaucgugagacacggcggcagagaggaggacaucacccuggugagagugcccggcagcugggagauccccguggccgccggcgagcuggccagaaaggaggacaucgacgccgugaucgccaucggcgugcugaucagaggcgccaccccccacuucgacuacaucgccagcgaggugagcaagggccuggccgaccugagccuggagcugagaaagcccaucaccuucggcgugaucaccgccgacacccuggagcaggccaucgagagagccggcaccaagcacggcaacaagggcugggaggccgcccugagcgccaucgagauggccaaccuguucaagagccugagaggcggcagcggcggcagcggcggcagcggcggcagcggcggcggccuguuccaggaguaccagugcuacggcagcagcagcaacaccagagugcugaacgagcugaacuacgacaacgccggcaccaaccuguacaacgagcuggagaugaacuacuacggcaagcaggagaacugguacagccugaagaagaacagcagaagccugggcgagaacgacgacggcaacaacgaggacaacgagaagcugagaaagcccaagcacaagaagcugaagcagcccgccgacggcaaccccgaccccaacgccaaccccaacguggaccccaacgccaaccccaacguggaccccaacgccaaccccaacguggaccccaacgccaaccccaacgccaaccccaacgccaaccccaacgccaaccccaacgccaaccccaacgccaaccccaacgccaaccccaacgccaaccccaacgccaaccccaacgccaaccccaacgccaaccccaacgccaaccccaacgccaaccccaacgccaaccccaacgccaaccccaacgccaaccccaacgccaaccccaacguggaccccaacgccaaccccaacgccaaccccaacgccaaccccaacgccaaccccaacgccaaccccaacgccaaccccaacgccaaccccaacgccaaccccaacgccaaccccaacgccaaccccaacgccaaccccaacgccaaccccaacgccaaccccaacgccaaccccaacgccaaccccaacgccaaccccaacgccaaccccaacgccaaccccaacaagaacaaccagggcaacggccagggccacaacaugcccaacgaccccaacagaaacguggacgagaacgccaacgccaacagcgccgugaagaacaacaacaacgaggagcccagcgacaagcacaucaaggaguaccugaacaagauccagaacagccugagcaccgaguggagccccugcagcgugaccugcggcaacggcauccaggugagaaucaagcccggcagcgccaacaagcccaaggacgagcuggacuacgccaacgacaucgagaagaagaucugcaagauggagaagugcagcagcguguucaacguggugaacagcagcaucggccugaucauggugcugagcuuccuguuccugaacugaggacuagucccuguucccagagcccacuuuuuuuucuuuuuuugaaauaaaauagccugucuuucagaucuaaaaaaaaaaaaaaaaaaaaaaaaaaaaaaaaaaaaaaaaaaaaaaaaaaaaaaaaaaaaaaaaugcaucccccccccccccccccccccccccccccccaaaggcucuuuucagagccaccagaauu

SEQ ID NO: 9013 - RNA, 1882 nt, Artificial Sequence
  mRNA Design a-3 (A64-N5-C30-hSL-N5) comprising derived and/or modified sequence from Pf(3D7)__XP_001351122.1__HsALB_Pf-CSP(19-272)_L(PVTN)_HBsAg (opt4)
aggagagggcgcuuggcuugcaaggacccugagcugcggcauugaagcacacccaacccaacucgacugaagucagccucacugaaccggaucugagaaucuucucucucugggcuugccagggcucuccgaaccuagcuagcauccucuucaauuccaacuagaaagcuuaccaugaagugggugaccuucaucagccugcuguuccuguucagcagcgccuacagccuguuccaggaguaccagugcuacggcagcagcagcaacaccagagugcugaacgagcugaacuacgacaacgccggcaccaaccuguacaacgagcuggagaugaacuacuacggcaagcaggagaacugguacagccugaagaagaacagcagaagccugggcgagaacgacgacggcaacaacgaggacaacgagaagcugagaaagcccaagcacaagaagcugaagcagcccgccgacggcaaccccgaccccaacgccaaccccaacguggaccccaacgccaaccccaacguggaccccaacgccaaccccaacguggaccccaacgccaaccccaacgccaaccccaacgccaaccccaacgccaaccccaacgccaaccccaacgccaaccccaacgccaaccccaacgccaaccccaacgccaaccccaacgccaaccccaacgccaaccccaacgccaaccccaacgccaaccccaacgccaaccccaacgccaaccccaacgccaaccccaacgccaaccccaacguggaccccaacgccaaccccaacgccaaccccaacgccaaccccaacgccaaccccaacgccaaccccaacgccaaccccaacgccaaccccaacgccaaccccaacgccaaccccaacgccaaccccaacgccaaccccaacgccaaccccaacgccaaccccaacgccaaccccaacgccaaccccaacgccaaccccaacgccaaccccaacgccaacccccccgugaccaacauggagaacaucaccagcggcuuccugggcccccugcuggugcugcaggccggcuucuuccugcugaccagaauccugaccaucccccagagccuggacagcugguggaccagccugaacuuccugggcggcagccccgugugccugggccagaacagccagagccccaccagcaaccacagccccaccagcugcccccccaucugccccggcuacagauggaugugccugagaagauucaucaucuuccuguucauccugcugcugugccugaucuuccugcuggugcugcuggacuaccagggcaugcugcccgugugcccccugauccccggcagcaccaccaccaacaccggccccugcaagaccugcaccacccccgcccagggcaacagcauguuccccagcugcugcugcaccaagcccaccgacggcaacugcaccugcauccccauccccagcagcugggccuucgccaaguaccugugggagugggccagcgugagauucagcuggcugagccugcuggugcccuucgugcagugguucgugggccugagccccaccguguggcugagcgccaucuggaugaugugguacuggggccccagccuguacagcaucgugagccccuucaucccccugcugcccaucuucuucugccuguggguguacaucugaggacuagucccuguucccagagcccacuuuuuuuucuuuuuuugaaauaaaauagccugucuuucagaucuaaaaaaaaaaaaaaaaaaaaaaaaaaaaaaaaaaaaaaaaaaaaaaaaaaaaaaaaaaaaaaaaugcaucccccccccccccccccccccccccccccccaaaggcucuuuucagagccaccagaauu

SEQ ID NO: 9014 - RNA, 1999 nt, Artificial Sequence
  mRNA Design a-3 (A64-N5-C30-hSL-N5) comprising derived and/or modified sequence from Pf(3D7)__XP_001351122.1__HsALB_Pf-CSP(19-272)_L(AAY)_Pf-CSP(346-3 65)_L(AAY)_PADRE_L(PVTN)_HBsAg (opt4)
aggagagggcgcuuggcuugcaaggacccugagcugcggcauugaagcacacccaacccaacucgacugaagucagccucacugaaccggaucugagaaucuucucucucugggcuugccagggcucuccgaaccuagcuagcauccucuucaauuccaacuagaaagcuuaccaugaagugggugaccuucaucagccugcuguuccuguucagcagcgccuacagccuguuccaggaguaccagugcuacggcagcagcagcaacaccagagugcugaacgagcugaacuacgacaacgccggcaccaaccuguacaacgagcuggagaugaacuacuacggcaagcaggagaacugguacagccugaagaagaacagcagaagccugggcgagaacgacgacggcaacaacgaggacaacgagaagcugagaaagcccaagcacaagaagcugaagcagcccgccgacggcaaccccgaccccaacgccaaccccaacguggaccccaacgccaaccccaacguggaccccaacgccaaccccaacguggaccccaacgccaaccccaacgccaaccccaacgccaaccccaacgccaaccccaacgccaaccccaacgccaaccccaacgccaaccccaacgccaaccccaacgccaaccccaacgccaaccccaacgccaaccccaacgccaaccccaacgccaaccccaacgccaaccccaacgccaaccccaacgccaaccccaacgccaaccccaacguggaccccaacgccaaccccaacgccaaccccaacgccaaccccaacgccaaccccaacgccaaccccaacgccaaccccaacgccaaccccaacgccaaccccaacgccaaccccaacgccaaccccaacgccaaccccaacgccaaccccaacgccaaccccaacgccaaccccaacgccaaccccaacgccaaccccaacgccaaccccaacgccaaccccgccgccuacaucaagcccggcagcgccaacaagcccaaggacgagcuggacuacgccaacgacaucgaggccgccuacgccaaguucguggccgccuggacccugaaggccgccgcccccgugaccaacauggagaacaucaccagcggcuuccugggcccccugcuggugcugcaggccggcuucuuccugcugaccagaauccugaccaucccccagagccuggacagcugguggaccagccugaacuuccugggcggcagccccgugugccugggccagaacagccagagccccaccagcaaccacagccccaccagcugcccccccaucugccccggcuacagauggaugugccugagaagauucaucaucuuccuguucauccugcugcugugccugaucuuccugcuggugcugcuggacuaccagggcaugcugcccgugugcccccugauccccggcagcaccaccaccaacaccggccccugcaagaccugcaccacccccgcccagggcaacagcauguuccccagcugcugcugcaccaagcccaccgacggcaacugcaccugcauccccauccccagcagcugggccuucgccaaguaccugugggagugggccagcgugagauucagcuggcugagccugcuggugcccuucgugcagugguucgugggccugagccccaccguguggcugagcgccaucuggaugaugugguacuggggccccagccuguacagcaucgugagccccuucaucccccugcugcccaucuucuucugccuguggguguacaucugaggacuagucccuguucccagagcccacuuuuuuuucuuuuuuugaaauaaaauagccugucuuucagaucuaaaaaaaaaaaaaaaaaaaaaaaaaaaaaaaaaaaaaaaaaaaaaaaaaaaaaaaaaaaaaaaaugcaucccccccccccccccccccccccccccccccaaaggcucuuuucagagccaccagaauu

SEQ ID NO: 9015 - RNA, 2218 nt, Artificial Sequence
  mRNA Design a-3 (A64-N5-C30-hSL-N5) comprising derived and/or modified sequence from Pf(3D7)__XP_001351122.1__HsALB_Pf-CSP(19-384)_L(PVTN)_HBsAg (opt4)
aggagagggcgcuuggcuugcaaggacccugagcugcggcauugaagcacacccaacccaacucgacugaagucagccucacugaaccggaucugagaaucuucucucucugggcuugccagggcucuccgaaccuagcuagcauccucuucaauuccaacuagaaagcuuaccaugaagugggugaccuucaucagccugcuguuccuguucagcagcgccuacagccuguuccaggaguaccagugcuacggcagcagcagcaacaccagagugcugaacgagcugaacuacgacaacgccggcaccaaccuguacaacgagcuggagaugaacuacuacggcaagcaggagaacugguacagccugaagaagaacagcagaagccugggcgagaacgacgacggcaacaacgaggacaacgagaagcugagaaagcccaagcacaagaagcugaagcagcccgccgacggcaaccccgaccccaacgccaaccccaacguggaccccaacgccaaccccaacguggaccccaacgccaaccccaacguggaccccaacgccaaccccaacgccaaccccaacgccaaccccaacgccaaccccaacgccaaccccaacgccaaccccaacgccaaccccaacgccaaccccaacgccaaccccaacgccaaccccaacgccaaccccaacgccaaccccaacgccaaccccaacgccaaccccaacgccaaccccaacgccaaccccaacgccaaccccaacguggaccccaacgccaaccccaacgccaaccccaacgccaaccccaacgccaaccccaacgccaaccccaacgccaaccccaacgccaaccccaacgccaaccccaacgccaaccccaacgccaaccccaacgccaaccccaacgccaaccccaacgccaaccccaacgccaaccccaacgccaaccccaacgccaaccccaacgccaaccccaacgccaaccccaacaagaacaaccagggcaacggccagggccacaacaugcccaacgaccccaacagaaacguggacgagaacgccaacgccaacagcgccgugaagaacaacaacaacgaggagcccagcgacaagcacaucaaggaguaccugaacaagauccagaacagccugagcaccgaguggagccccugcagcgugaccugcggcaacggcauccaggugagaaucaagcccggcagcgccaacaagcccaaggacgagcuggacuacgccaacgacaucgagaagaagaucugcaagauggagaagugcagcagcguguucaacguggugaacagcagccccgugaccaacauggagaacaucaccagcggcuuccugggcccccugcuggugcugcaggccggcuucuuccugcugaccagaauccugaccaucccccagagccuggacagcugguggaccagccugaacuuccugggcggcagccccgugugccugggccagaacagccagagccccaccagcaaccacagccccaccagcugcccccccaucugccccggcuacagauggaugugccugagaagauucaucaucuuccuguucauccugcugcugugccugaucuuccugcuggugcugcuggacuaccagggcaugcugcccgugugcccccugauccccggcagcaccaccaccaacaccggccccugcaagaccugcaccacccccgcccagggcaacagcauguuccccagcugcugcugcaccaagcccaccgacggcaacugcaccugcauccccauccccagcagcugggccuucgccaaguaccugugggagugggccagcgugagauucagcuggcugagccugcuggugcccuucgugcagugguucgugggccugagccccaccguguggcugagcgccaucuggaugaugugguacuggggccccagccuguacagcaucgugagccccuucaucccccugcugcccaucuucuucugccuguggguguacaucugaggacuagucccuguucccagagcccacuuuuuuuucuuuuuuugaaauaaaauagccugucuuucagaucuaaaaaaaaaaaaaaaaaaaaaaaaaaaaaaaaaaaaaaaaaaaaaaaaaaaaaaaaaaaaaaaaugcaucccccccccccccccccccccccccccccccaaaggcucuuuucagagccaccagaauu

SEQ ID NO: 9016 - RNA, 2035 nt, Artificial Sequence
  mRNA Design a-3 (A64-N5-C30-hSL-N5) comprising derived and/or modified sequence from Pf(3D7)__XP_001351122.1__HsALB_Pf-CSP(19-384)_L(SGG)_Ferritin (opt4)
aggagagggcgcuuggcuugcaaggacccugagcugcggcauugaagcacacccaacccaacucgacugaagucagccucacugaaccggaucugagaaucuucucucucugggcuugccagggcucuccgaaccuagcuagcauccucuucaauuccaacuagaaagcuuaccaugaagugggugaccuucaucagccugcuguuccuguucagcagcgccuacagccuguuccaggaguaccagugcuacggcagcagcagcaacaccagagugcugaacgagcugaacuacgacaacgccggcaccaaccuguacaacgagcuggagaugaacuacuacggcaagcaggagaacugguacagccugaagaagaacagcagaagccugggcgagaacgacgacggcaacaacgaggacaacgagaagcugagaaagcccaagcacaagaagcugaagcagcccgccgacggcaaccccgaccccaacgccaaccccaacguggaccccaacgccaaccccaacguggaccccaacgccaaccccaacguggaccccaacgccaaccccaacgccaaccccaacgccaaccccaacgccaaccccaacgccaaccccaacgccaaccccaacgccaaccccaacgccaaccccaacgccaaccccaacgccaaccccaacgccaaccccaacgccaaccccaacgccaaccccaacgccaaccccaacgccaaccccaacgccaaccccaacgccaaccccaacguggaccccaacgccaaccccaacgccaaccccaacgccaaccccaacgccaaccccaacgccaaccccaacgccaaccccaacgccaaccccaacgccaaccccaacgccaaccccaacgccaaccccaacgccaaccccaacgccaaccccaacgccaaccccaacgccaaccccaacgccaaccccaacgccaaccccaacgccaaccccaacgccaaccccaacaagaacaaccagggcaacggccagggccacaacaugcccaacgaccccaacagaaacguggacgagaacgccaacgccaacagcgccgugaagaacaacaacaacgaggagcccagcgacaagcacaucaaggaguaccugaacaagauccagaacagccugagcaccgaguggagccccugcagcgugaccugcggcaacggcauccaggugagaaucaagcccggcagcgccaacaagcccaaggacgagcuggacuacgccaacgacaucgagaagaagaucugcaagauggagaagugcagcagcguguucaacguggugaacagcagcagcggcggccugagcaaggacaucaucaagcugcugaacgagcaggugaacaaggagaugaacagcagcaaccuguacaugagcaugagcagcuggugcuacacccacagccuggacggcgccggccuguuccuguucgaccacgccgccgaggaguacgagcacgccaagaagcugaucaucuuccugaacgagaacaacgugcccgugcagcugaccagcaucagcgcccccgagcacaaguucgagggccugacccagaucuuccagaaggccuacgagcacgagcagcacaucagcgagagcaucaacaacaucguggaccacgccaucaagagcaaggaccacgccaccuucaacuuccugcagugguacguggccgagcagcacgaggaggaggugcuguucaaggacauccuggacaagaucgagcugaucggcaacgagaaccacggccuguaccuggccgaccaguacgugaagggcaucgccaagagcagaaagagcugaggacuagucccuguucccagagcccacuuuuuuuucuuuuuuugaaauaaaauagccugucuuucagaucuaaaaaaaaaaaaaaaaaaaaaaaaaaaaaaaaaaaaaaaaaaaaaaaaaaaaaaaaaaaaaaaaugcaucccccccccccccccccccccccccccccccaaaggcucuuuucagagccaccagaauu

SEQ ID NO: 9017 - RNA, 1996 nt, Artificial Sequence
  mRNA Design a-3 (A64-N5-C30-hSL-N5) comprising derived and/or modified sequence from Pf(3D7)__XP_001351122.1__HsALB_Pf-CSP(93-384)_L(PVTN)_HBsAg (opt4)
aggagagggcgcuuggcuugcaaggacccugagcugcggcauugaagcacacccaacccaacucgacugaagucagccucacugaaccggaucugagaaucuucucucucugggcuugccagggcucuccgaaccuagcuagcauccucuucaauuccaacuagaaagcuuaccaugaagugggugaccuucaucagccugcuguuccuguucagcagcgccuacagcaagcugaagcagcccgccgacggcaaccccgaccccaacgccaaccccaacguggaccccaacgccaaccccaacguggaccccaacgccaaccccaacguggaccccaacgccaaccccaacgccaaccccaacgccaaccccaacgccaaccccaacgccaaccccaacgccaaccccaacgccaaccccaacgccaaccccaacgccaaccccaacgccaaccccaacgccaaccccaacgccaaccccaacgccaaccccaacgccaaccccaacgccaaccccaacgccaaccccaacgccaaccccaacguggaccccaacgccaaccccaacgccaaccccaacgccaaccccaacgccaaccccaacgccaaccccaacgccaaccccaacgccaaccccaacgccaaccccaacgccaaccccaacgccaaccccaacgccaaccccaacgccaaccccaacgccaaccccaacgccaaccccaacgccaaccccaacgccaaccccaacgccaaccccaacgccaaccccaacaagaacaaccagggcaacggccagggccacaacaugcccaacgaccccaacagaaacguggacgagaacgccaacgccaacagcgccgugaagaacaacaacaacgaggagcccagcgacaagcacaucaaggaguaccugaacaagauccagaacagccugagcaccgaguggagccccugcagcgugaccugcggcaacggcauccaggugagaaucaagcccggcagcgccaacaagcccaaggacgagcuggacuacgccaacgacaucgagaagaagaucugcaagauggagaagugcagcagcguguucaacguggugaacagcagccccgugaccaacauggagaacaucaccagcggcuuccugggcccccugcuggugcugcaggccggcuucuuccugcugaccagaauccugaccaucccccagagccuggacagcugguggaccagccugaacuuccugggcggcagccccgugugccugggccagaacagccagagccccaccagcaaccacagccccaccagcugcccccccaucugccccggcuacagauggaugugccugagaagauucaucaucuuccuguucauccugcugcugugccugaucuuccugcuggugcugcuggacuaccagggcaugcugcccgugugcccccugauccccggcagcaccaccaccaacaccggccccugcaagaccugcaccacccccgcccagggcaacagcauguuccccagcugcugcugcaccaagcccaccgacggcaacugcaccugcauccccauccccagcagcugggccuucgccaaguaccugugggagugggccagcgugagauucagcuggcugagccugcuggugcccuucgugcagugguucgugggccugagccccaccguguggcugagcgccaucuggaugaugugguacuggggccccagccuguacagcaucgugagccccuucaucccccugcugcccaucuucuucugccuguggguguacaucugaggacuagucccuguucccagagcccacuuuuuuuucuuuuuuugaaauaaaauagccugucuuucagaucuaaaaaaaaaaaaaaaaaaaaaaaaaaaaaaaaaaaaaaaaaaaaaaaaaaaaaaaaaaaaaaaaugcaucccccccccccccccccccccccccccccccaaaggcucuuuucagagccaccagaauu

SEQ ID NO: 9018 - RNA, 1657 nt, Artificial Sequence; identical to SEQ ID NO: 6464
  mRNA Design a-3 (A64-N5-C30-hSL-N5) comprising derived and/or modified sequence from Pf(3D7)__XP_001351122.1__HsALB_Pf-CSP(199-377)_L(PVTN)_HBsAg (opt4)

SEQ ID NO: 9019 - RNA, 1354 nt, Artificial Sequence
  mRNA Design a-3 (A64-N5-C30-hSL-N5) comprising derived and/or modified sequence from Pf(3D7)__XP_001351122.1__HsALB_Pf-CSP(19-272)_L(AAY)_Pf-CSP(346-3 75)_L(AAY)_Pf-CSP(310-327) (opt4)
aggagagggcgcuuggcuugcaaggacccugagcugcggcauugaagcacacccaacccaacucgacugaagucagccucacugaaccggaucugagaaucuucucucucugggcuugccagggcucuccgaaccuagcuagcauccucuucaauuccaacuagaaagcuuaccaugaagugggugaccuucaucagccugcuguuccuguucagcagcgccuacagccuguuccaggaguaccagugcuacggcagcagcagcaacaccagagugcugaacgagcugaacuacgacaacgccggcaccaaccuguacaacgagcuggagaugaacuacuacggcaagcaggagaacugguacagccugaagaagaacagcagaagccugggcgagaacgacgacggcaacaacgaggacaacgagaagcugagaaagcccaagcacaagaagcugaagcagcccgccgacggcaaccccgaccccaacgccaaccccaacguggaccccaacgccaaccccaacguggaccccaacgccaaccccaacguggaccccaacgccaaccccaacgccaaccccaacgccaaccccaacgccaaccccaacgccaaccccaacgccaaccccaacgccaaccccaacgccaaccccaacgccaaccccaacgccaaccccaacgccaaccccaacgccaaccccaacgccaaccccaacgccaaccccaacgccaaccccaacgccaaccccaacgccaaccccaacguggaccccaacgccaaccccaacgccaaccccaacgccaaccccaacgccaaccccaacgccaaccccaacgccaaccccaacgccaaccccaacgccaaccccaacgccaaccccaacgccaaccccaacgccaaccccaacgccaaccccaacgccaaccccaacgccaaccccaacgccaaccccaacgccaaccccaacgccaaccccaacgccaaccccgccgccuacaucaagcccggcagcgccaacaagcccaaggacgagcuggacuacgccaacgacaucgagaagaagaucugcaagauggagaagugcagcgccgccuacgagcccagcgacaagcacaucaaggaguaccugaacaagauccagaacagccugugaggacuagucccuguucccagagcccacuuuuuuuucuuuuuuugaaauaaaauagccugucuuucagaucuaaaaaaaaaaaaaaaaaaaaaaaaaaaaaaaaaaaaaaaaaaaaaaaaaaaaaaaaaaaaaaaaugcaucccccccccccccccccccccccccccccccaaaggcucuuuucagagccaccagaauu

SEQ ID NO: 9020 - RNA, 1402 nt, Artificial Sequence
  mRNA Design a-3 (A64-N5-C30-hSL-N5) comprising derived and/or modified sequence from Pf(3D7)__XP_001351122.1__HsALB_Pf-CSP(19-272)_L(AAY)_Pf-CSP(346-3 75)_L(AAY)_Pf-CSP(310-327)_L(AAY)_PADRE (opt4)
aggagagggcgcuuggcuugcaaggacccugagcugcggcauugaagcacacccaacccaacucgacugaagucagccucacugaaccggaucugagaaucuucucucucugggcuugccagggcucuccgaaccuagcuagcauccucuucaauuccaacuagaaagcuuaccaugaagugggugaccuucaucagccugcuguuccuguucagcagcgccuacagccuguuccaggaguaccagugcuacggcagcagcagcaacaccagagugcugaacgagcugaacuacgacaacgccggcaccaaccuguacaacgagcuggagaugaacuacuacggcaagcaggagaacugguacagccugaagaagaacagcagaagccugggcgagaacgacgacggcaacaacgaggacaacgagaagcugagaaagcccaagcacaagaagcugaagcagcccgccgacggcaaccccgaccccaacgccaaccccaacguggaccccaacgccaaccccaacguggaccccaacgccaaccccaacguggaccccaacgccaaccccaacgccaaccccaacgccaaccccaacgccaaccccaacgccaaccccaacgccaaccccaacgccaaccccaacgccaaccccaacgccaaccccaacgccaaccccaacgccaaccccaacgccaaccccaacgccaaccccaacgccaaccccaacgccaaccccaacgccaaccccaacgccaaccccaacguggaccccaacgccaaccccaacgccaaccccaacgccaaccccaacgccaaccccaacgccaaccccaacgccaaccccaacgccaaccccaacgccaaccccaacgccaaccccaacgccaaccccaacgccaaccccaacgccaaccccaacgccaaccccaacgccaaccccaacgccaaccccaacgccaaccccaacgccaaccccaacgccaaccccgccgccuacaucaagcccggcagcgccaacaagcccaaggacgagcuggacuacgccaacgacaucgagaagaagaucugcaagauggagaagugcagcgccgccuacgagcccagcgacaagcacaucaaggaguaccugaacaagauccagaacagccuggccgccuacgccaaguucguggccgccuggacccugaaggccgccgccugaggacuagucccuguucccagagcccacuuuuuuuucuuuuuuugaaauaaaauagccugucuuucagaucuaaaaaaaaaaaaaaaaaaaaaaaaaaaaaaaaaaaaaaaaaaaaaaaaaaaaaaaaaaaaaaaaugcaucccccccccccccccccccccccccccccccaaaggcucuuuucagagccaccagaauu

SEQ ID NO: 9021 - RNA, 1402 nt, Artificial Sequence
  mRNA Design a-3 (A64-N5-C30-hSL-N5) comprising derived and/or modified sequence from Pf(3D7)__XP_001351122.1__HsALB_Pf-CSP(19-272)_L(AAY)_Pf-CSP(310-3 27)_L(AAY)_Pf-CSP(346-375)_L(AAY)_PADRE (opt4)
aggagagggcgcuuggcuugcaaggacccugagcugcggcauugaagcacacccaacccaacucgacugaagucagccucacugaaccggaucugagaaucuucucucucugggcuugccagggcucuccgaaccuagcuagcauccucuucaauuccaacuagaaagcuuaccaugaagugggugaccuucaucagccugcuguuccuguucagcagcgccuacagccuguuccaggaguaccagugcuacggcagcagcagcaacaccagagugcugaacgagcugaacuacgacaacgccggcaccaaccuguacaacgagcuggagaugaacuacuacggcaagcaggagaacugguacagccugaagaagaacagcagaagccugggcgagaacgacgacggcaacaacgaggacaacgagaagcugagaaagcccaagcacaagaagcugaagcagcccgccgacggcaaccccgaccccaacgccaaccccaacguggaccccaacgccaaccccaacguggaccccaacgccaaccccaacguggaccccaacgccaaccccaacgccaaccccaacgccaaccccaacgccaaccccaacgccaaccccaacgccaaccccaacgccaaccccaacgccaaccccaacgccaaccccaacgccaaccccaacgccaaccccaacgccaaccccaacgccaaccccaacgccaaccccaacgccaaccccaacgccaaccccaacgccaaccccaacguggaccccaacgccaaccccaacgccaaccccaacgccaaccccaacgccaaccccaacgccaaccccaacgccaaccccaacgccaaccccaacgccaaccccaacgccaaccccaacgccaaccccaacgccaaccccaacgccaaccccaacgccaaccccaacgccaaccccaacgccaaccccaacgccaaccccaacgccaaccccaacgccaaccccgccgccuacgagcccagcgacaagcacaucaaggaguaccugaacaagauccagaacagccuggccgccuacaucaagcccggcagcgccaacaagcccaaggacgagcuggacuacgccaacgacaucgagaagaagaucugcaagauggagaagugcagcgccgccuacgccaaguucguggccgccuggacccugaaggccgccgccugaggacuagucccuguucccagagcccacuuuuuuuucuuuuuuugaaauaaaauagccugucuuucagaucuaaaaaaaaaaaaaaaaaaaaaaaaaaaaaaaaaaaaaaaaaaaaaaaaaaaaaaaaaaaaaaaaugcaucccccccccccccccccccccccccccccccaaaggcucuuuucagagccaccagaauu

SEQ ID NO: 9022 - RNA, 1456 nt, Artificial Sequence
  mRNA Design a-3 (A64-N5-C30-hSL-N5) comprising derived and/or modified sequence from Pf(3D7)__XP_001351122.1__HsALB_Pf-CSP(19-272)_L(AAY)_Pf-CSP(310-3 27)_L(AAY)_Pf-CSP(346-375)_L(AAY)_PADRE_L(AAY)_P2 (opt4)
aggagagggcgcuuggcuugcaaggacccugagcugcggcauugaagcacacccaacccaacucgacugaagucagccucacugaaccggaucugagaaucuucucucucugggcuugccagggcucuccgaaccuagcuagcauccucuucaauuccaacuagaaagcuuaccaugaagugggugaccuucaucagccugcuguuccuguucagcagcgccuacagccuguuccaggaguaccagugcuacggcagcagcagcaacaccagagugcugaacgagcugaacuacgacaacgccggcaccaaccuguacaacgagcuggagaugaacuacuacggcaagcaggagaacugguacagccugaagaagaacagcagaagccugggcgagaacgacgacggcaacaacgaggacaacgagaagcugagaaagcccaagcacaagaagcugaagcagcccgccgacggcaaccccgaccccaacgccaaccccaacguggaccccaacgccaaccccaacguggaccccaacgccaaccccaacguggaccccaacgccaaccccaacgccaaccccaacgccaaccccaacgccaaccccaacgccaaccccaacgccaaccccaacgccaaccccaacgccaaccccaacgccaaccccaacgccaaccccaacgccaaccccaacgccaaccccaacgccaaccccaacgccaaccccaacgccaaccccaacgccaaccccaacgccaaccccaacguggaccccaacgccaaccccaacgccaaccccaacgccaaccccaacgccaaccccaacgccaaccccaacgccaaccccaacgccaaccccaacgccaaccccaacgccaaccccaacgccaaccccaacgccaaccccaacgccaaccccaacgccaaccccaacgccaaccccaacgccaaccccaacgccaaccccaacgccaaccccaacgccaaccccgccgccuacgagcccagcgacaagcacaucaaggaguaccugaacaagauccagaacagccuggccgccuacaucaagcccggcagcgccaacaagcccaaggacgagcuggacuacgccaacgacaucgagaagaagaucugcaagauggagaagugcagcgccgccuacgccaaguucguggccgccuggacccugaaggccgccgccgccgccuaccaguacaucaaggccaacagcaaguucaucggcaucaccgagcugugaggacuagucccuguucccagagcccacuuuuuuuucuuuuuuugaaauaaaauagccugucuuucagaucuaaaaaaaaaaaaaaaaaaaaaaaaaaaaaaaaaaaaaaaaaaaaaaaaaaaaaaaaaaaaaaaaugcaucccccccccccccccccccccccccccccccaaaggcucuuuucagagccaccagaauu

SEQ ID NO: 9023 - RNA, 1420 nt, Artificial Sequence
  mRNA Design a-3 (A64-N5-C30-hSL-N5) comprising derived and/or modified sequence from Pf(3D7)__XP_001351122.1__HsALB_Pf-CSP(19-272)_L(AAY)_Pf-CSP(310-3 27)_Linker (AAY)_Pf-CSP(346-397) (opt4)
aggagagggcgcuuggcuugcaaggacccugagcugcggcauugaagcacacccaacccaacucgacugaagucagccucacugaaccggaucugagaaucuucucucucugggcuugccagggcucuccgaaccuagcuagcauccucuucaauuccaacuagaaagcuuaccaugaagugggugaccuucaucagccugcuguuccuguucagcagcgccuacagccuguuccaggaguaccagugcuacggcagcagcagcaacaccagagugcugaacgagcugaacuacgacaacgccggcaccaaccuguacaacgagcuggagaugaacuacuacggcaagcaggagaacugguacagccugaagaagaacagcagaagccugggcgagaacgacgacggcaacaacgaggacaacgagaagcugagaaagcccaagcacaagaagcugaagcagcccgccgacggcaaccccgaccccaacgccaaccccaacguggaccccaacgccaaccccaacguggaccccaacgccaaccccaacguggaccccaacgccaaccccaacgccaaccccaacgccaaccccaacgccaaccccaacgccaaccccaacgccaaccccaacgccaaccccaacgccaaccccaacgccaaccccaacgccaaccccaacgccaaccccaacgccaaccccaacgccaaccccaacgccaaccccaacgccaaccccaacgccaaccccaacgccaaccccaacguggaccccaacgccaaccccaacgccaaccccaacgccaaccccaacgccaaccccaacgccaaccccaacgccaaccccaacgccaaccccaacgccaaccccaacgccaaccccaacgccaaccccaacgccaaccccaacgccaaccccaacgccaaccccaacgccaaccccaacgccaaccccaacgccaaccccaacgccaaccccaacgccaaccccgccgccuacgagcccagcgacaagcacaucaaggaguaccugaacaagauccagaacagccuggccgccuacaucaagcccggcagcgccaacaagcccaaggacgagcuggacuacgccaacgacaucgagaagaagaucugcaagauggagaagugcagcagcguguucaacguggugaacagcagcaucggccugaucauggugcugagcuuccuguuccugaacugaggacuagucccuguucccagagcccacuuuuuuuucuuuuuuugaaauaaaauagccugucuuucagaucuaaaaaaaaaaaaaaaaaaaaaaaaaaaaaaaaaaaaaaaaaaaaaaaaaaaaaaaaaaaaaaaaugcaucccccccccccccccccccccccccccccccaaaggcucuuuucagagccaccagaauu

SEQ ID NO: 9024 - RNA, 2020 nt, Artificial Sequence
  mRNA Design a-3 (A64-N5-C30-hSL-N5) comprising derived and/or modified sequence from Pf(3D7)__XP_001351122.1__LumSynt_L(GGS4-GGG)_Pf-CSP(19-397) (opt5)
aggagagggcgcuuggcuugcaaggacccugagcugcggcauugaagcacacccaacccaacucgacugaagucagccucacugaaccggaucugagaaucuucucucucugggcuugccagggcucuccgaaccuagcuagcauccucuucaauuccaacuagaaagcuuaccaugcagaucuacgagggcaagcugaccgccgaagggcucagauucggaauuguggcuagccgguuuaaccacgcccuggucgaccgccuuguugagggcgcgaucgaugcuauugugagacaugggggacgggaagaggacaucacacuggugcgcguccccggcuccugggaaauuccuguggccgccggggagcucgcuagaaaagaggauaucgacgccguuaucgcuauuggagugcugauccggggcgccacgccgcacuucgauuauauugcgucugaagucagcaagggccuugccgaccugucccucgagcugcgcaaacccaucaccuuuggggugauuacagcugauacccuggaacaagccaucgagagagcuggaacaaagcauggcaauaaagggugggaggccgcgcucucugccauugaaauggcuaaccuguucaagagccuucggggaggcuccgggggaucuggcggcagcgggggauccggcgggggacuguuucaggaguaccagugcuauggcuccucuuccaauacccgcguucucaacgaacugaauuacgacaacgccgggacaaaucuuuauaacgagcuggaaaugaauuacuauggaaagcaggagaacugguacagccucaaaaagaacucuagaucccugggcgagaaugaugacggcaauaacgaagauaaugagaaacugcggaagccuaaacacaagaagcucaaacaacccgcugacgggaacccugaucccaacgccaauccuaacguggacccgaaugccaaccccaaugucgacccuaacgcuaaucccaacguggauccuaaugcgaaccccaaugccaacccgaaugcuaacccuaaugccaaccccaacgccaauccuaacgcuaaucccaacgccaaucccaacgcgaauccuaacgcuaauccgaacgccaaucccaacgccaauccuaacgcuaaucccaacgccaacccuaaugcuaaccccaaugccaacccgaaugcgaacccuaaugccaaccccaauguggacccuaacgcuaaucccaacgccaauccuaacgcuaaucccaacgccaacccgaaugcgaacccuaaugccaaccccaaugcuaaccccaaugccaacccuaaugcuaacccgaaugccaaccccaaugccaacccuaaugcuaaccccaaugcgaacccuaacgccaaucccaacgcuaauccuaacgccaaucccaacgccaauccgaacgcuaauccuaacaagaauaaccagggaaauggccaggggcauaacaugcccaaugauccuaaccgcaacgucgacgaaaaugccaacgcgaauagcgcuguuaaaaacaauaacaaugaggaacccucugauaagcacaucaaagaguaccugaacaagauccagaauagccuuagcaccgagugguccccguguucugugacgugcggaaacggcauucaagugagaaucaaaccugggagcgccaauaagcccaaggacgaacuggauuaugccaacgacauugagaaaaagaucuguaaaauggaaaagugcuccagcgucuucaaugugguuaacucuuccauuggccucaucauggugcugagcuuucuuuuccugaauugaggacuagucccuguucccagagcccacuuuuuuuucuuuuuuugaaauaaaauagccugucuuucagaucuaaaaaaaaaaaaaaaaaaaaaaaaaaaaaaaaaaaaaaaaaaaaaaaaaaaaaaaaaaaaaaaaugcaucccccccccccccccccccccccccccccccaaaggcucuuuucagagccaccagaauu

SEQ ID NO: 9025 - RNA, 1882 nt, Artificial Sequence
  mRNA Design a-3 (A64-N5-C30-hSL-N5) comprising derived and/or modified sequence from Pf(3D7)__XP_001351122.1__HsALB_Pf-CSP(19-272)_L(PVTN)_HBsAg (opt5)
aggagagggcgcuuggcuugcaaggacccugagcugcggcauugaagcacacccaacccaacucgacugaagucagccucacugaaccggaucugagaaucuucucucucugggcuugccagggcucuccgaaccuagcuagcauccucuucaauuccaacuagaaagcuuaccaugaagugggugaccuucaucagccugcucuuucuguucuccucugccuacagccuuuuucaggaguaucaaugcuacggcuccucuagcaacacaagaguccugaaugaacucaacuaugacaaugcugggacgaaccuguacaaugagcuugaaaugaacuauuacggaaaacaggagaauugguauucccugaagaaaaacucucggagccucggcgaaaaugaugacgggaacaaugaggauaacgagaagcugcgcaaacccaagcacaagaaacugaagcagccugccgacggaaauccggaucccaacgcgaauccuaacguugaccccaacgcuaauccuaacguggaucccaaugccaacccuaauguggacccgaacgccaaucccaacgcuaauccuaacgccaaucccaacgcuaauccuaacgccaaucccaacgcgaacccgaaugccaacccuaaugcuaaccccaaugccaacccuaaugcuaaccccaaugccaaccccaaugcgaacccuaaugccaacccgaaugcuaaccccaacgccaauccuaacgcuaaucccaacgccaauccuaacgucgaucccaaugccaacccgaaugcuaacccuaaugcgaaccccaaugccaacccuaaugcuaaccccaacgccaauccuaacgccaaucccaacgcuaauccgaacgccaauccuaacgcgaaucccaacgcuaaucccaacgccaauccuaacgccaauccgaacgcuaaucccaacgccaacccuaaugcuaaccccaaugccaacccuaaugcgaaucccccugugaccaacauggaaaacauuacauccggcuuccucgggccccugcuuguucugcaggccggauuuuuccuccugaccagaauccuuacaauuccgcaaagccuggacucuugguggaccucccucaauuuucugggcggcagcccugugugucuggggcagaacucucagucccccacaagcaaucauucuccuaccuccugucccccgaucugcccuggauaccgguggaugugccuccgcagauucauuaucuuucuguucauccuucugcucugucugauuuuucuucugguccuccuggauuaccagggcaugcugcccgugugcccucucauccccgggagcacgaccacaaacaccggacccuguaaaacaugcaccacgccugcucaaggcaauuccauguucccgucuuguugcuguacaaagcccaccgacgggaacugcacaugcauuccuauccccagcuccugggccuuugcuaaauaucugugggagugggccagcguucgguucucuuggcuuucccugcucgugccuuucguccagugguuugugggacugagccccaccguguggcuuucugcgauuuggaugaugugguacuggggcccuagccuguauuccaucgucucuccguucauuccccuccugccuaucuuuuucugucuguggguuuacaucugaggacuagucccuguucccagagcccacuuuuuuuucuuuuuuugaaauaaaauagccugucuuucagaucuaaaaaaaaaaaaaaaaaaaaaaaaaaaaaaaaaaaaaaaaaaaaaaaaaaaaaaaaaaaaaaaaugcaucccccccccccccccccccccccccccccccaaaggcucuuuucagagccaccagaauu

SEQ ID NO: 9026 - RNA, 1999 nt, Artificial Sequence
  mRNA Design a-3 (A64-N5-C30-hSL-N5) comprising derived and/or modified sequence from Pf(3D7)__XP_001351122.1__HsALB_Pf-CSP(19-272)_L(AAY)_Pf-CSP(346-3 65)_L(AAY)_PADRE_L(PVTN)_HBsAg (opt5)
aggagagggcgcuuggcuugcaaggacccugagcugcggcauugaagcacacccaacccaacucgacugaagucagccucacugaaccggaucugagaaucuucucucucugggcuugccagggcucuccgaaccuagcuagcauccucuucaauuccaacuagaaagcuuaccaugaagugggugaccuucaucagccugcucuuucuguucuccucugccuacagccuuuuucaggaguaucaaugcuacggcuccucuagcaacacaagaguccugaaugaacucaacuaugacaaugcugggacgaaccuguacaaugagcuugaaaugaacuauuacggaaaacaggagaauugguauucccugaagaaaaacucucggagccucggcgaaaaugaugacgggaacaaugaggauaacgagaagcugcgcaaacccaagcacaagaaacugaagcagccugccgacggaaauccggaucccaacgcgaauccuaacguugaccccaacgcuaauccuaacguggaucccaaugccaacccuaauguggacccgaacgccaaucccaacgcuaauccuaacgccaaucccaacgcuaauccuaacgccaaucccaacgcgaacccgaaugccaacccuaaugcuaaccccaaugccaacccuaaugcuaaccccaaugccaaccccaaugcgaacccuaaugccaacccgaaugcuaaccccaacgccaauccuaacgcuaaucccaacgccaauccuaacgucgaucccaaugccaacccgaaugcuaacccuaaugcgaaccccaaugccaacccuaaugcuaaccccaacgccaauccuaacgccaaucccaacgcuaauccgaacgccaauccuaacgcgaaucccaacgcuaaucccaacgccaauccuaacgccaauccgaacgcuaaucccaacgccaacccuaaugcuaaccccaaugccaacccuaaugcgaaccccgccgcuuacauuaaaccuggcuccgccaauaagcccaaagacgaacucgauuacgcuaacgacaucgaggccgcguaugccaaguucguggcugccuggacccugaaggcugccgccccgguuacaaauauggaaaacauuaccagcggguuucuuggaccucugcucgugcugcaggcuggcuucuuucuucugacaagaauccucaccauuccccaaucucuggauuccugguggacaagccugaauuuccucggcgggucuccugucugucugggacagaacucccagagccccaccucuaaucauuccccgacgagcugcccucccaucuguccuggcuaccgguggaugugccuucgcagauuuaucauuuuccuguuuauccuccugcuuugucugauuuuccuccuggugcugcucgacuaucaggggaugcugcccguuugcccccuuaucccuggauccaccacaaccaacacaggcccguguaaaaccugcacgacacccgcgcaaggaaauucuauguuuccuagcuguugcuguaccaagcccacagacgggaacuguaccugcauuccuauccccuccagcugggccuucgcuaaauaccugugggagugggccucugugcgguucuccuggcucagccugcuugucccuuuugugcagugguucgugggccugucuccgaccgucuggcucagcgccauuuggaugaugugguauuggggccccucccuguacucuaucguuagcccuuuuaucccccugcucccuauuuucuuuugccuguggguguauaucugaggacuagucccuguucccagagcccacuuuuuuuucuuuuuuugaaauaaaauagccugucuuucagaucuaaaaaaaaaaaaaaaaaaaaaaaaaaaaaaaaaaaaaaaaaaaaaaaaaaaaaaaaaaaaaaaaugcaucccccccccccccccccccccccccccccccaaaggcucuuuucagagccaccagaauu

SEQ ID NO: 9027 - RNA, 2218 nt, Artificial Sequence
  mRNA Design a-3 (A64-N5-C30-hSL-N5) comprising derived and/or modified sequence from Pf(3D7)__XP_001351122.1__HsALB_Pf-CSP(19-384)_L(PVTN)_HBsAg (opt5)
aggagagggcgcuuggcuugcaaggacccugagcugcggcauugaagcacacccaacccaacucgacugaagucagccucacugaaccggaucugagaaucuucucucucugggcuugccagggcucuccgaaccuagcuagcauccucuucaauuccaacuagaaagcuuaccaugaagugggugaccuucaucagccugcucuuucuguucuccucugccuacagccuuuuucaggaguaucaaugcuacggcuccucuagcaacacaagaguccugaaugaacucaacuaugacaaugcugggacgaaccuguacaaugagcuugaaaugaacuauuacggaaaacaggagaauugguauucccugaagaaaaacucucggagccucggcgaaaaugaugacgggaacaaugaggauaacgagaagcugcgcaaacccaagcacaagaaacugaagcagccugccgacggaaauccggaucccaacgcgaauccuaacguugaccccaacgcuaauccuaacguggaucccaaugccaacccuaauguggacccgaacgccaaucccaacgcuaauccuaacgccaaucccaacgcuaauccuaacgccaaucccaacgcgaacccgaaugccaacccuaaugcuaaccccaaugccaacccuaaugcuaaccccaaugccaaccccaaugcgaacccuaaugccaacccgaaugcuaaccccaacgccaauccuaacgcuaaucccaacgccaauccuaacgucgaucccaaugccaacccgaaugcuaacccuaaugcgaaccccaaugccaacccuaaugcuaaccccaacgccaauccuaacgccaaucccaacgcuaauccgaacgccaauccuaacgcgaaucccaacgcuaaucccaacgccaauccuaacgccaauccgaacgcuaaucccaacgccaacccuaaugcuaaccccaaugccaacccuaaugcgaaccccaauaaaaacaaucagggcaacgggcaaggacauaauaugccuaacgaccccaauagaaacguggaugaaaaugccaacgcuaacuccgccguuaagaauaacaauaacgaggaaccgagcgacaaacacauuaaggaguaccucaauaagauccagaacucucuguccaccgaguggagcccuuguucugugacaugcggcaauggcauucagguccggaucaaacccggguccgcuaacaagccuaaagaugaacuugacuacgccaaugacauugagaagaaaaucuguaagauggaaaaaugcagcucuguguucaacguugucaauuccagccccgugaccaacauggagaauaucacauccggauuucugggcccgcuccuggugcuucaggcgggguucuuucugcucacccgcauucugacaaucccucaaucucuggauagcugguggaccucccucaacuuccugggaggcagccccgugugucuugggcaaaauucucaguccccuacgagcaaccauucucccaccagcugucccccuauuugcccgggauauagauggaugugccugcggcgcuuuaucauuuuccucuuuauccugcuucugugucucauuuuccugcugguccuccuggacuaccagggcaugcuucccguuugcccucugauccccggcuccacaaccacaaacaccgggccuuguaagacgugcacaacccccgcccagggaaauucuauguuuccuagcugcuguugcacaaagccgaccgauggcaacuguaccugcauccccauuccuuccagcugggcuuucgccaaauaucucugggaaugggcuucugugagauucuccuggcugagccuucuggugcccuuuguccagugguucguggggcucucuccuacaguuuggcuguccgccaucuggaugaugugguacuggggacccagccuguauuccauugugucuccguuuaucccucuccugcccauuuucuuuugucuuugggucuacaucugaggacuagucccuguucccagagcccacuuuuuuuucuuuuuuugaaauaaaauagccugucuuucagaucuaaaaaaaaaaaaaaaaaaaaaaaaaaaaaaaaaaaaaaaaaaaaaaaaaaaaaaaaaaaaaaaaugcaucccccccccccccccccccccccccccccccaaaggcucuuuucagagccaccagaauu

SEQ ID NO: 9028 - RNA, 2035 nt, Artificial Sequence
  mRNA Design a-3 (A64-N5-C30-hSL-N5) comprising derived and/or modified sequence from Pf(3D7)__XP_001351122.1__HsALB_Pf-CSP(19-384)_L(SGG)_Ferritin (opt5)
aggagagggcgcuuggcuugcaaggacccugagcugcggcauugaagcacacccaacccaacucgacugaagucagccucacugaaccggaucugagaaucuucucucucugggcuugccagggcucuccgaaccuagcuagcauccucuucaauuccaacuagaaagcuuaccaugaagugggugaccuucaucagccugcucuuucuguucuccucugccuacagccuuuuucaggaguaucaaugcuacggcuccucuagcaacacaagagugcugaaugaacucaacuaugacaaugcugggacgaaccuguacaaugagcuugaaaugaacuauuacggaaaacaggagaauugguauucccugaagaaaaacucucggagccucggcgaaaaugaugacgggaacaaugaggauaacgagaagcugcgcaaacccaagcacaagaaacugaagcagccugccgacggaaauccggaucccaacgcgaauccuaacguugaccccaacgcuaauccuaacguggaucccaaugccaacccuaauguggacccgaacgccaaucccaacgcuaauccuaacgccaaucccaacgcuaauccuaacgccaaucccaacgcgaacccgaaugccaacccuaaugcuaaccccaaugccaacccuaaugcuaaccccaaugccaaccccaaugcgaacccuaaugccaacccgaaugcuaaccccaacgccaauccuaacgcuaaucccaacgccaauccuaacgucgaucccaaugccaacccgaaugcuaacccuaaugcgaaccccaaugccaacccuaaugcuaaccccaacgccaauccuaacgccaaucccaacgcuaauccgaacgccaauccuaacgcgaaucccaacgcuaaucccaacgccaauccuaacgccaauccgaacgcuaaucccaacgccaacccuaaugcuaaccccaaugccaacccuaaugcgaaccccaauaaaaacaaucagggcaacgggcaaggacauaauaugccuaacgaccccaauagaaacguggaugaaaaugccaacgcuaacuccgccguuaagaauaacaauaacgaggaaccgagcgacaaacacauuaaggaguaccucaauaagauccagaacucucuguccaccgaguggagcccuuguucugugacaugcggcaauggcauucagguccggaucaaacccggguccgcuaacaagccuaaagaugaacuugacuacgccaaugacauugagaagaaaaucuguaagauggaaaaaugcagcucuguguucaacguugugaacuccagcuccggaggccugucuaaggauaucauuaagcuccugaaugagcaggucaauaaagaaaugaacagcuccaaucuuuauaugagcaugucuuccugguguuacacccauagccuggacggggcgggacucuuucuguucgaucacgccgcugaggaguaugaacaugccaagaaacugaucauuuuucucaacgagaacaaugugcccgugcaacugacaucuaucagcgcuccggaacacaaguucgagggccuuacccagauuuuucagaaagccuacgaacacgagcagcauaucuccgagucuauuaacaauaucgucgaccacgccaucaagagcaaggaucaugcuacauucaacuuucugcaaugguauguugcggaacagcacgaggaagagguccucuucaaagacauucuggauaagaucgaacuuauugggaaugagaaccacggacuguaccucgccgaccaguaugugaaaggcaucgcuaagucccgcaaaagcugaggacuagucccuguucccagagcccacuuuuuuuucuuuuuuugaaauaaaauagccugucuuucagaucuaaaaaaaaaaaaaaaaaaaaaaaaaaaaaaaaaaaaaaaaaaaaaaaaaaaaaaaaaaaaaaaaugcaucccccccccccccccccccccccccccccccaaaggcucuuuucagagccaccagaauu

SEQ ID NO: 9029 - RNA, 1996 nt, Artificial Sequence
  mRNA Design a-3 (A64-N5-C30-hSL-N5) comprising derived and/or modified sequence from Pf(3D7)__XP_001351122.1__HsALB_Pf-CSP(93-384)_L(PVTN)_HBsAg (opt5)
aggagagggcgcuuggcuugcaaggacccugagcugcggcauugaagcacacccaacccaacucgacugaagucagccucacugaaccggaucugagaaucuucucucucugggcuugccagggcucuccgaaccuagcuagcauccucuucaauuccaacuagaaagcuuaccaugaagugggugaccuucaucagccugcucuuucuguucuccucugccuacagcaaacuuaagcagcccgcugacggcaacccugauccgaaugccaaccccaaugucgacccuaacgcgaaucccaacguugauccuaaugcuaaccccaauguggacccuaacgccaauccgaacgccaaucccaacgcuaauccuaacgccaaccccaaugcuaacccuaaugccaaccccaaugcgaacccgaaugccaacccuaaugcuaaccccaaugccaacccuaaugcuaaccccaaugccaaccccaacgcgaauccuaacgccaauccgaacgcuaaucccaacgccaauccuaacgcuaaucccaacguggauccuaaugccaaccccaaugccaacccgaaugcuaacccuaacgcgaaucccaacgccaauccuaacgcuaaucccaacgccaauccuaacgccaaucccaacgcuaauccgaacgccaauccuaacgcgaaucccaacgcuaaccccaaugccaacccuaaugccaacccgaaugcuaaccccaaugccaacccuaaugcuaaccccaaugccaacccuaauaaaaacaaucaagggaacggacagggccacaauaugcccaacgacccuaacagaaaugucgaugagaacgcgaaugccaacuccgcugugaagaauaacaauaacgaggaacccucugacaaacauauuaaggaauaucugaauaagauccagaacagccucuccacagaguggucuccgugcagcguuacgugugggaaugggauucaggugcggaucaaaccuggcuccgccaacaagcccaaagaugaacuggacuacgcuaaugauauugagaagaaaaucugcaagauggagaaguguagcucugucuuuaacgugguuaauuccagcccugugaccaacauggaaaacaucacaucuggguuccuuggaccccugcucguccugcaagccggcuuuuuccugcucacccgcauucugacaaucccgcagucccuugacagcugguggaccucucugaauuuucucggcggguccccugugugccugggacagaacagccagucccccacaucuaaucacagcccuaccuccuguccucccauuugccccggcuauagauggaugugucuucggcgcuucaucauuuuucuguucauccuccugcugugccucauuuuucugcuugugcugcucgauuaccaagggaugcugccggucuguccccuuaucccuggaagcacgaccacaaacaccggccccugcaaaacauguaccacgccugcgcagggaaauucuauguuccccuccugcugcuguacaaagccuaccgacggaaacugcacauguaucccgauucccagcucuugggccuuugcuaaauaucugugggagugggccagcguuagauucuccuggcucucucugcuggugccuuucgugcagugguuugucggccucagccccaccguguggcuguccgcuaucuggaugaugugguacuggggcccuagccuuuauucuauuguuucccccuucaucccgcugcucccuaucuuuuucugccuguggguguacauuugaggacuagucccuguucccagagcccacuuuuuuuucuuuuuuugaaauaaaauagccugucuuucagaucuaaaaaaaaaaaaaaaaaaaaaaaaaaaaaaaaaaaaaaaaaaaaaaaaaaaaaaaaaaaaaaaaugcaucccccccccccccccccccccccccccccccaaaggcucuuuucagagccaccagaauu

SEQ ID NO: 9030 - RNA, 1657 nt, Artificial Sequence; identical to SEQ ID NO: 6494
  mRNA Design a-3 (A64-N5-C30-hSL-N5) comprising derived and/or modified sequence from Pf(3D7)__XP_001351122.1__HsALB_Pf-CSP(199-377)_L(PVTN)_HBsAg (opt5)

SEQ ID NO: 9031 - RNA, 1354 nt, Artificial Sequence
  mRNA Design a-3 (A64-N5-C30-hSL-N5) comprising derived and/or modified sequence from Pf(3D7)__XP_001351122.1__HsALB_Pf-CSP(19-272)_L(AAY)_Pf-CSP(346-3 75)_L(AAY)_Pf-CSP(310-327) (opt5)
aggagagggcgcuuggcuugcaaggacccugagcugcggcauugaagcacacccaacccaacucgacugaagucagccucacugaaccggaucugagaaucuucucucucugggcuugccagggcucuccgaaccuagcuagcauccucuucaauuccaacuagaaagcuuaccaugaagugggugaccuucaucagccugcucuuucuguucuccucugccuacagccuuuuucaggaguaucaaugcuacggcuccucuagcaacacaagaguccugaaugaacucaacuaugacaaugcugggacgaaccuguacaaugagcuugaaaugaacuauuacggaaaacaggagaauugguauucccugaagaaaaacucucggagccucggcgaaaaugaugacgggaacaaugaggauaacgagaagcugcgcaaacccaagcacaagaaacugaagcagccugccgacggaaauccggaucccaacgcgaauccuaacguugaccccaacgcuaauccuaacguggaucccaaugccaacccuaauguggacccgaacgccaaucccaacgcuaauccuaacgccaaucccaacgcuaauccuaacgccaaucccaacgcgaacccgaaugccaacccuaaugcuaaccccaaugccaacccuaaugcuaaccccaaugccaaccccaaugcgaacccuaaugccaacccgaaugcuaaccccaacgccaauccuaacgcuaaucccaacgccaauccuaacgucgaucccaaugccaacccgaaugcuaacccuaaugcgaaccccaaugccaacccuaaugcuaaccccaacgccaauccuaacgccaaucccaacgcuaauccgaacgccaauccuaacgcgaaucccaacgcuaaucccaacgccaauccuaacgccaauccgaacgcuaaucccaacgccaacccuaaugcuaaccccaaugccaacccuaaugcgaaccccgccgcuuacauuaaaccuggcuccgccaauaagcccaaagacgaacucgauuacgcuaacgacaucgagaagaagauuuguaaaauggaaaagugcagcgccgcguaugagccgucugauaaacauaucaaggaguaccugaauaaaauucagaacucccuuugaggacuagucccuguucccagagcccacuuuuuuuucuuuuuuugaaauaaaauagccugucuuucagaucuaaaaaaaaaaaaaaaaaaaaaaaaaaaaaaaaaaaaaaaaaaaaaaaaaaaaaaaaaaaaaaaaugcaucccccccccccccccccccccccccccccccaaaggcucuuuucagagccaccagaauu

SEQ ID NO: 9032 - RNA, 1402 nt, Artificial Sequence
  mRNA Design a-3 (A64-N5-C30-hSL-N5) comprising derived and/or modified sequence from Pf(3D7)__XP_001351122.1__HsALB_Pf-CSP(19-272)_L(AAY)_Pf-CSP(346-3 75)_L(AAY)_Pf-CSP(310-327)_L(AAY)_PADRE (opt5)
aggagagggcgcuuggcuugcaaggacccugagcugcggcauugaagcacacccaacccaacucgacugaagucagccucacugaaccggaucugagaaucuucucucucugggcuugccagggcucuccgaaccuagcuagcauccucuucaauuccaacuagaaagcuuaccaugaagugggugaccuucaucagccugcucuuucuguucuccucugccuacagccuuuuucaggaguaucaaugcuacggcuccucuagcaacacaagaguccugaaugaacucaacuaugacaaugcugggacgaaccuguacaaugagcuugaaaugaacuauuacggaaaacaggagaauugguauucccugaagaaaaacucucggagccucggcgaaaaugaugacgggaacaaugaggauaacgagaagcugcgcaaacccaagcacaagaaacugaagcagccugccgacggaaauccggaucccaacgcgaauccuaacguugaccccaacgcuaauccuaacguggaucccaaugccaacccuaauguggacccgaacgccaaucccaacgcuaauccuaacgccaaucccaacgcuaauccuaacgccaaucccaacgcgaacccgaaugccaacccuaaugcuaaccccaaugccaacccuaaugcuaaccccaaugccaaccccaaugcgaacccuaaugccaacccgaaugcuaaccccaacgccaauccuaacgcuaaucccaacgccaauccuaacgucgaucccaaugccaacccgaaugcuaacccuaaugcgaaccccaaugccaacccuaaugcuaaccccaacgccaauccuaacgccaaucccaacgcuaauccgaacgccaauccuaacgcgaaucccaacgcuaaucccaacgccaauccuaacgccaauccgaacgcuaaucccaacgccaacccuaaugcuaaccccaaugccaacccuaaugcgaaccccgccgcuuacauuaaaccuggcuccgccaauaagcccaaagacgaacucgauuacgcuaacgacaucgagaagaagauuuguaaaauggaaaagugcagcgccgcguaugagccgucugauaaacauaucaaggaguaccugaauaaaauucagaacucccuugccgcuuaugccaaguucguggcugccuggacccugaaagccgcugcgugaggacuagucccuguucccagagcccacuuuuuuuucuuuuuuugaaauaaaauagccugucuuucagaucuaaaaaaaaaaaaaaaaaaaaaaaaaaaaaaaaaaaaaaaaaaaaaaaaaaaaaaaaaaaaaaaaugcaucccccccccccccccccccccccccccccccaaaggcucuuuucagagccaccagaauu

SEQ ID NO: 9033 - RNA, 1402 nt, Artificial Sequence
  mRNA Design a-3 (A64-N5-C30-hSL-N5) comprising derived and/or modified sequence from Pf(3D7)__XP_001351122.1__HsALB_Pf-CSP(19-272)_L(AAY)_Pf-CSP(310-3 27)_L(AAY)_Pf-CSP(346-375)_L(AAY)_PADRE (opt5)
aggagagggcgcuuggcuugcaaggacccugagcugcggcauugaagcacacccaacccaacucgacugaagucagccucacugaaccggaucugagaaucuucucucucugggcuugccagggcucuccgaaccuagcuagcauccucuucaauuccaacuagaaagcuuaccaugaagugggugaccuucaucagccugcucuuucuguucuccucugccuacagccuuuuucaggaguaucaaugcuacggcuccucuagcaacacaagaguccugaaugaacucaacuaugacaaugcugggacgaaccuguacaaugagcuugaaaugaacuauuacggaaaacaggagaauugguauucccugaagaaaaacucucggagccucggcgaaaaugaugacgggaacaaugaggauaacgagaagcugcgcaaacccaagcacaagaaacugaagcagccugccgacggaaauccggaucccaacgcgaauccuaacguugaccccaacgcuaauccuaacguggaucccaaugccaacccuaauguggacccgaacgccaaucccaacgcuaauccuaacgccaaucccaacgcuaauccuaacgccaaucccaacgcgaacccgaaugccaacccuaaugcuaaccccaaugccaacccuaaugcuaaccccaaugccaaccccaaugcgaacccuaaugccaacccgaaugcuaaccccaacgccaauccuaacgcuaaucccaacgccaauccuaacgucgaucccaaugccaacccgaaugcuaacccuaaugcgaaccccaaugccaacccuaaugcuaaccccaacgccaauccuaacgccaaucccaacgcuaauccgaacgccaauccuaacgcgaaucccaacgcuaaucccaacgccaauccuaacgccaauccgaacgcuaaucccaacgccaacccuaaugcuaaccccaaugccaacccuaaugcgaaccccgccgcuuacgaaccuuccgacaaacauauuaaggaguaccucaauaaaauccagaacagccuggccgcuuauauuaagcccggcucugccaauaagccgaaagaugaacuugacuacgcgaacgauaucgagaagaaaauuuguaagauggagaaaugcuccgccgcuuaugccaaguucguggcugccuggacccugaaagccgcugcgugaggacuagucccuguucccagagcccacuuuuuuuucuuuuuuugaaauaaaauagccugucuuucagaucuaaaaaaaaaaaaaaaaaaaaaaaaaaaaaaaaaaaaaaaaaaaaaaaaaaaaaaaaaaaaaaaaugcaucccccccccccccccccccccccccccccccaaaggcucuuuucagagccaccagaauu

SEQ ID NO: 9034 - RNA, 1456 nt, Artificial Sequence
  mRNA Design a-3 (A64-N5-C30-hSL-N5) comprising derived and/or modified sequence from Pf(3D7)__XP_001351122.1__HsALB_Pf-CSP(19-272)_L(AAY)_Pf-CSP(310-3 27)_L(AAY)_Pf-CSP(346-375)_L(AAY)_PADRE_L(AAY)_P2 (opt5)
aggagagggcgcuuggcuugcaaggacccugagcugcggcauugaagcacacccaacccaacucgacugaagucagccucacugaaccggaucugagaaucuucucucucugggcuugccagggcucuccgaaccuagcuagcauccucuucaauuccaacuagaaagcuuaccaugaagugggugaccuucaucagccugcucuuucuguucuccucugccuacagccuuuuucaggaguaucaaugcuacggcuccucuagcaacacaagaguccugaaugaacucaacuaugacaaugcugggacgaaccuguacaaugagcuugaaaugaacuauuacggaaaacaggagaauugguauucccugaagaaaaacucucggagccucggcgaaaaugaugacgggaacaaugaggauaacgagaagcugcgcaaacccaagcacaagaaacugaagcagccugccgacggaaauccggaucccaacgcgaauccuaacguugaccccaacgcuaauccuaacguggaucccaaugccaacccuaauguggacccgaacgccaaucccaacgcuaauccuaacgccaaucccaacgcuaauccuaacgccaaucccaacgcgaacccgaaugccaacccuaaugcuaaccccaaugccaacccuaaugcuaaccccaaugccaaccccaaugcgaacccuaaugccaacccgaaugcuaaccccaacgccaauccuaacgcuaaucccaacgccaauccuaacgucgaucccaaugccaacccgaaugcuaacccuaaugcgaaccccaaugccaacccuaaugcuaaccccaacgccaauccuaacgccaaucccaacgcuaauccgaacgccaauccuaacgcgaaucccaacgcuaaucccaacgccaauccuaacgccaauccgaacgcuaaucccaacgccaacccuaaugcuaaccccaaugccaacccuaaugcgaaccccgccgcuuacgaaccuuccgacaaacauauuaaggaguaccucaauaaaauccagaacagccuggccgcuuauauuaagcccggcucugccaauaagccgaaagaugaacuugacuacgcgaacgauaucgagaagaaaauuuguaagauggagaaaugcuccgccgcuuaugccaaguucguggcugccuggacccugaaagccgcugcggccgcuuaccaauauaucaaggccaauagcaaguuuaucgggauuacagaacucugaggacuagucccuguucccagagcccacuuuuuuuucuuuuuuugaaauaaaauagccugucuuucagaucuaaaaaaaaaaaaaaaaaaaaaaaaaaaaaaaaaaaaaaaaaaaaaaaaaaaaaaaaaaaaaaaaugcaucccccccccccccccccccccccccccccccaaaggcucuuuucagagccaccagaauu

SEQ ID NO: 9035 - RNA, 1420 nt, Artificial Sequence
  mRNA Design a-3 (A64-N5-C30-hSL-N5) comprising derived and/or modified sequence from Pf(3D7)__XP_001351122.1__HsALB_Pf-CSP(19-272)_L(AAY)_Pf-CSP(310-3 27)_Linker (AAY)_Pf-CSP(346-397) (opt5)
aggagagggcgcuuggcuugcaaggacccugagcugcggcauugaagcacacccaacccaacucgacugaagucagccucacugaaccggaucugagaaucuucucucucugggcuugccagggcucuccgaaccuagcuagcauccucuucaauuccaacuagaaagcuuaccaugaagugggugaccuucaucagccugcucuuucuguucuccucugccuacagccuuuuucaggaguaucaaugcuacggcuccucuagcaacacaagaguccugaaugaacucaacuaugacaaugcugggacgaaccuguacaaugagcuugaaaugaacuauuacggaaaacaggagaauugguauucccugaagaaaaacucucggagccucggcgaaaaugaugacgggaacaaugaggauaacgagaagcugcgcaaacccaagcacaagaaacugaagcagccugccgacggaaauccggaucccaacgcgaauccuaacguugaccccaacgcuaauccuaacguggaucccaaugccaacccuaauguggacccgaacgccaaucccaacgcuaauccuaacgccaaucccaacgcuaauccuaacgccaaucccaacgcgaacccgaaugccaacccuaaugcuaaccccaaugccaacccuaaugcuaaccccaaugccaaccccaaugcgaacccuaaugccaacccgaaugcuaaccccaacgccaauccuaacgcuaaucccaacgccaauccuaacgucgaucccaaugccaacccgaaugcuaacccuaaugcgaaccccaaugccaacccuaaugcuaaccccaacgccaauccuaacgccaaucccaacgcuaauccgaacgccaauccuaacgcgaaucccaacgcuaaucccaacgccaauccuaacgccaauccgaacgcuaaucccaacgccaacccuaaugcuaaccccaaugccaacccuaaugcgaaccccgccgcuuacgaaccuuccgacaaacauauuaaggaguaccucaauaaaauccagaacagccuggccgcuuauauuaagcccggcucugccaauaagccgaaagaugaacuugacuacgcgaacgauaucgagaagaaaauuuguaagauggagaaaugcuccagcguguucaauguugugaacucuuccaucgggcugaucaugguccucagcuuucuguuccuuaauugaggacuagucccuguucccagagcccacuuuuuuuucuuuuuuugaaauaaaauagccugucuuucagaucuaaaaaaaaaaaaaaaaaaaaaaaaaaaaaaaaaaaaaaaaaaaaaaaaaaaaaaaaaaaaaaaaugcaucccccccccccccccccccccccccccccccaaaggcucuuuucagagccaccagaauu

SEQ ID NO: 9036 - RNA, 2020 nt, Artificial Sequence
  mRNA Design a-3 (A64-N5-C30-hSL-N5) comprising derived and/or modified sequence from Pf(3D7)__XP_001351122.1__LumSynt_L(GGS4-GGG)_Pf-CSP(19-397) (opt6)
aggagagggcgcuuggcuugcaaggacccugagcugcggcauugaagcacacccaacccaacucgacugaagucagccucacugaaccggaucugagaaucuucucucucugggcuugccagggcucuccgaaccuagcuagcauccucuucaauuccaacuagaaagcuuaccaugcaaauauacgaaggaaaacuaacagcagaaggauuacgauucggcauaguagcaucaagguucaaccacgcauuaguagauagacuaguagaaggagcaauagacgcaauaguccgacauggaggacgagaagaagauauaacacuagucagaguaccagggagcugggaaaucccaguagcagcaggagaacucgcaagaaaagaagauaucgacgccguaaucgcaaucgggguacuaauaagaggcgcaacaccccauuucgacuacauagcaagcgaaguaucaaaaggauuagcagaccuaaguuuagaacuaagaaaaccuauuacauucggcgucauaacggcagacacauuagaacaagccaucgaaagagcaggaacaaaacacggaaacaaaggcugggaagcagcacuaagcgcaauugaaauggcaaauuuauucaaaucccuaagaggcggcucagguggcaguggaggaucaggaggaucaggaggaggccuauuccaagaauaucaaugcuacggaucgagcucgaauacacgcguauuaaacgaauuaaacuacgacaacgcaggaacaaaccuauacaacgaacuagaaaugaacuauuauggaaaacaagagaacugguacucccuaaaaaaaaacagucgaagcuuaggagaaaaugacgacggaaauaacgaagacaacgaaaaacuaagaaaacccaaacauaaaaaauuaaaacaacccgcugacggaaacccagacccaaacgcuaacccgaacguugauccaaaugcaaacccaaauguggauccaaaugcaaaccccaacguagauccaaaugcaaacccaaacgcaaaccccaaugccaacccaaacgccaacccuaaugcuaauccaaacgcaaacccaaacgcaaacccgaacgcaaauccaaacgcaaacccuaaugcuaacccaaaugcaaauccaaacgcaaacccaaacgcuaacccaaacgcaaacccaaaugcaaacccaaaugcaaacccaaacgcaaauccaaacguagacccaaacgcaaauccaaacgcaaauccaaacgcaaacccaaacgccaaccccaaugcaaauccgaacgcaaacccaaacgcaaacccaaacgcaaacccaaacgcaaacccaaaugccaacccaaacgcaaacccgaacgcaaacccaaacgcaaacccaaacgcaaacccuaaugcgaacccaaaugccaacccaaacgcaaaccccaacgcuaacccaaacaaaaacaaucaaggaaacggacaagggcacaacaugccaaacgauccaaacagaaaugucgacgaaaacgccaaugcaaacagugccguaaaaaauaauaacaacgaagaaccuucagacaaacacauaaaagaauacuuaaacaaaauacaaaacucauuaucaaccgaauggagcccauguucuguuacaugcggaaauggaauacaaguaagaauaaaaccaggaucagcaaacaaaccaaaagacgaauuagacuacgcaaaugauauagaaaaaaaaauaugcaagauggaaaaaugcaguucuguauuuaacguaguaaacagcucaauaggucuaauaaugguacuauccuuucuuuuccugaacuaaggacuagucccuguucccagagcccacuuuuuuuucuuuuuuugaaauaaaauagccugucuuucagaucuaaaaaaaaaaaaaaaaaaaaaaaaaaaaaaaaaaaaaaaaaaaaaaaaaaaaaaaaaaaaaaaaugcaucccccccccccccccccccccccccccccccaaaggcucuuuucagagccaccagaauu

SEQ ID NO: 9037 - RNA, 1882 nt, Artificial Sequence
  mRNA Design a-3 (A64-N5-C30-hSL-N5) comprising derived and/or modified sequence from Pf(3D7)__XP_001351122.1__HsALB_Pf-CSP(19-272)_L(PVTN)_HBsAg (opt6)
aggagagggcgcuuggcuugcaaggacccugagcugcggcauugaagcacacccaacccaacucgacugaagucagccucacugaaccggaucugagaaucuucucucucugggcuugccagggcucuccgaaccuagcuagcauccucuucaauuccaacuagaaagcuuaccaugaaauggguaaccuucaucucacuauuauucuuauuuucaucugcauacucacucuuccaagaauaccaaugcuacgguucaucuucuaacacaagaguacuaaacgaacuaaacuacgacaacgcaggaacaaaccucuauaacgaacuugaaaugaacuacuauggaaaacaagaaaacugguauucccuaaaaaaaaacucaagauccuuaggagaaaacgacgacggaaauaacgaagacaacgaaaaacuaagaaaaccaaaacacaaaaaacuaaaacaacccgcagacggaaacccagacccaaacgcaaacccaaacguagacccaaacgcaaacccaaacgucgacccaaacgccaauccaaacguagacccaaacgcuaacccaaacgccaauccaaacgcaaauccaaaugccaacccaaacgcaaacccaaaugcgaauccaaaugcaaaccccaaugcaaacccaaacgcaaauccaaacgcaaacccaaacgcaaacccuaacgcaaauccaaaugcaaacccuaacgcaaacccaaacgcaaauccaaacgcaaacccaaaugcaaauccaaacgucgacccaaacgcaaacccgaacgcaaacccaaacgcaaacccaaaugcaaauccaaaugcaaaccccaaugcaaacccaaacgcaaacccaaacgcuaacccaaaugcaaacccaaacgcaaacccaaacgcaaauccaaacgcaaacccaaacgcaaacccaaaugcaaacccaaacgcaaaccccaaugcaaauccaaacgcaaacccaaacgcaaacccacccguaaccaacauggaaaacaucacaucaggauuccuuggaccccucuuaguacuucaagcaggauucuuccuauuaacaagaauacuaacaauaccucaaucuuuagauucaugguggacuucauuaaauuuccuaggaggaagcccaguaugcuuaggacaaaacagccaaucaccaaccucaaaccacucaccaaccucaugcccaccaauaugcccaggauaccgauggaugugccuaagaagauucauaauauucuuauucauacuacuacuaugccucauauucuuacuaguacuauuagacuaccaaggaaugcugccagucugcccacuuauaccagguagcaccaccacuaacacaggaccuugcaaaacaugcacaacacccgcucaaggaaauucuauguuuccaucaugcugcugcacuaaacccacagauggcaauuguacaugcauaccaauccccucaucaugggcauuugccaaauacuuaugggaaugggcaucuguaagauucucuuggcuaucacucuuaguaccauucguacaaugguucguaggccuauccccuacaguauggcuauccgcaauauggaugaugugguacuggggaccaucacuauacucaauagucucacccuucauaccacuauuaccaauauucuucugccuauggguauauauauaaggacuagucccuguucccagagcccacuuuuuuuucuuuuuuugaaauaaaauagccugucuuucagaucuaaaaaaaaaaaaaaaaaaaaaaaaaaaaaaaaaaaaaaaaaaaaaaaaaaaaaaaaaaaaaaaaugcaucccccccccccccccccccccccccccccccaaaggcucuuuucagagccaccagaauu

SEQ ID NO: 9038 - RNA, 1999 nt, Artificial Sequence
  mRNA Design a-3 (A64-N5-C30-hSL-N5) comprising derived and/or modified sequence from Pf(3D7)__XP_001351122.1__HsALB_Pf-CSP(19-272)_L(AAY)_Pf-CSP(346-3 65)_L(AAY)_PADRE_L(PVTN)_HBsAg (opt6)
aggagagggcgcuuggcuugcaaggacccugagcugcggcauugaagcacacccaacccaacucgacugaagucagccucacugaaccggaucugagaaucuucucucucugggcuugccagggcucuccgaaccuagcuagcauccucuucaauuccaacuagaaagcuuaccaugaaaugggucaccuucauuuccuuauuauucuuauuuucguccgcauacucacuauuucaagaauaucaauguuacggaucaagcucaaacacccgcguacucaacgaacuaaacuacgacaacgcaggaacaaaccuauauaacgaacuagaaaugaauuauuacggaaaacaagaaaacugguauucacuuaaaaaaaacuccagaucccuuggcgaaaacgacgacggaaauaaugaagacaacgaaaaacuuagaaaaccaaaacauaaaaaacuaaaacaaccugcagacgguaacccagauccaaaugcuaacccaaauguagacccuaacgcuaacccaaacguagauccaaacgccaacccaaacguagauccaaacgcaaacccaaacgcaaauccaaaugcaaacccaaacgccaaccccaacgcaaacccaaaugcaaauccuaaugcaaaucccaacgcaaauccaaacgcaaauccaaaugcaaaccccaacgcaaacccaaaugcaaauccaaaugcaaauccaaaugcaaacccaaacgcaaacccaaaugcaaauccuaacgcaaacccaaacgucgaccccaacgcaaauccaaacgcaaacccaaacgcaaaccccaaugcaaacccaaaugcaaacccaaacgcaaacccaaacgcaaaccccaacgcaaauccaaacgcaaauccaaaugcaaauccaaacgcaaaccccaaugcaaaccccaaugcuaacccaaacgccaaucccaacgcaaacccaaacgcaaaucccaacgcaaauccaaacgcaaacccugcagcauacauaaaacccggcucugcuaauaaacccaaagaugaacucgacuaugccaacgacauagaagcagccuacgcaaaauucguagcugcauggacauuaaaagcagcagcaccagugacaaacauggaaaacauuacaucaggauucuuagguccauuauuaguccuccaagcaggauucuucuuacuaacuagaauauuaacaauaccacaaucccuagacucuugguggacuucacuaaauuuccuaggaggauccccaguaugucucggucaaaauucucaaucaccuacaucaaaccauucaccaacaagcugccccccaaucugucccggauacagauggaugugccuacgcagauucauuauauuucuauucauacuacuucuaugccuaauauuccuacuaguccuucuagacuaccaaggaaugcuacccguaugcccacuuauaccaggauccacaacaacaaacacagguccaugcaaaacaugcacaacaccagcccaagguaauucuauguucccaucaugcuguugcacaaaaccaacagacgguaacugcacaugcaucccaauacccucaucaugggcauucgcaaaauaccuaugggaaugggcuucaguaagauucuccugguuaucccuuuuagucccauucguacaaugguucguaggauuaucacccacuguauggcuaucagcaauauggaugaugugguauuggggcccaucucuuuacucaaucgucuccccuuuuauuccacuacuacccauauuuuucugccuauggguauacauuuaaggacuagucccuguucccagagcccacuuuuuuuucuuuuuuugaaauaaaauagccugucuuucagaucuaaaaaaaaaaaaaaaaaaaaaaaaaaaaaaaaaaaaaaaaaaaaaaaaaaaaaaaaaaaaaaaaugcaucccccccccccccccccccccccccccccccaaaggcucuuuucagagccaccagaauu

SEQ ID NO: 9039 - RNA, 2218 nt, Artificial Sequence
  mRNA Design a-3 (A64-N5-C30-hSL-N5) comprising derived and/or modified sequence from Pf(3D7)__XP_001351122.1__HsALB_Pf-CSP(19-384)_L(PVTN)_HBsAg (opt6)
aggagagggcgcuuggcuugcaaggacccugagcugcggcauugaagcacacccaacccaacucgacugaagucagccucacugaaccggaucugagaaucuucucucucugggcuugccagggcucuccgaaccuagcuagcauccucuucaauuccaacuagaaagcuuaccaugaaauggguaaccuucauaucucucuuauuccuuuuuucaucugcauauucacuauuucaagaauaucaauguuauggaucaucaucaaacacccgaguacucaacgaauuaaauuacgacaacgcagguacuaacuuauacaacgaauuagaaaugaauuacuauggaaaacaagaaaacugguauucccucaaaaaaaacucucgaucucuaggcgaaaacgacgacggcaacaacgaagacaacgaaaaacuacguaaacccaaacacaaaaaacuaaaacaaccagcagauggaaacccagacccaaacgcaaacccaaacguagacccaaacgcaaauccaaacguagacccgaacgcaaauccaaauguagaucccaaugcuaauccaaaugccaacccaaacgcaaacccuaacgcuaaucccaacgcaaacccaaacgcaaacccaaaugcaaacccaaacgcaaaccccaacgcaaacccaaaugcaaauccaaaugcaaauccaaacgccaacccaaaugccaacccaaacgcaaauccaaacgcuaaccccaacgcaaaccccaacgccaaucccaacguagaccccaacgcaaacccaaaugcaaauccaaacgcaaaccccaaugcaaacccaaacgcuaacccuaaugcaaacccaaacgccaacccaaaugcaaaccccaacgccaacccaaacgcaaauccaaacgcaaacccaaacgcuaacccaaacgccaacccaaacgcaaacccaaacgcuaacccaaacgcaaacccaaaugcaaacccaaaugcuaauccaaauaaaaacaaccaaggaaacggccaaggacauaauaugccuaacgacccaaacagaaacguagacgaaaaugcaaacgcaaacuccgcaguaaaaaauaacaauaacgaagaacccuccgacaaacauauaaaagaauaucuaaacaaaauacaaaauucacucucuacugaaugguccccaugcucaguaacauguggaaacggaauccaaguacgcauaaaaccaggaucagcaaacaaaccaaaagacgaacuagacuacgcaaacgauauagaaaaaaaaauaugcaaaauggaaaaaugcuccuccguauucaacguagucaauucaucuccaguaaccaauauggaaaauauaaccuccggauuccuaggaccacuacucguuuuacaagcaggauucuucuuacuaacaagaauacucacuauaccacaaucccuggauucuugguggacaucccuaaauuucuuaggcggaucacccguaugccuaggccaaaauagccaaaguccaacuucaaaccacuccccaacuucuugcccaccaauaugccccggcuacagauggaugugccuucgacgauucauaauauuucuauucauacuauuacuaugucuaauauuccuacucguucuauuagacuaccaaggaauguuaccaguuugcccacuaauaccugguucaacaaccacuaacacuggucccugcaaaacauguaccaccccagcccaaggaaacucaauguuccccucaugcuguugcacaaaaccaaccgacggaaauugcacaugcauacccauaccaucuucuugggcauuugcuaaauaucuaugggaaugggcaucaguacgcuucucauggcuaucucuacuaguaccauucguccaaugguucguaggccuaucaccaacaguauggcuaucugcaauauggaugaugugguacuggggucccuccuuauauucaauuguaucaccuuuuaucccacuccuacccauauucuucuguuuauggguauacauauaaggacuagucccuguucccagagcccacuuuuuuuucuuuuuuugaaauaaaauagccugucuuucagaucuaaaaaaaaaaaaaaaaaaaaaaaaaaaaaaaaaaaaaaaaaaaaaaaaaaaaaaaaaaaaaaaaugcaucccccccccccccccccccccccccccccccaaaggcucuuuucagagccaccagaauu

SEQ ID NO: 9040 - RNA, 2035 nt, Artificial Sequence
  mRNA Design a-3 (A64-N5-C30-hSL-N5) comprising derived and/or modified sequence from Pf(3D7)__XP_001351122.1__HsALB_Pf-CSP(19-384)_L(SGG)_Ferritin (opt6)
aggagagggcgcuuggcuugcaaggacccugagcugcggcauugaagcacacccaacccaacucgacugaagucagccucacugaaccggaucugagaaucuucucucucugggcuugccagggcucuccgaaccuagcuagcauccucuucaauuccaacuagaaagcuuaccaugaaauggguaacauuuauaucucuauuauucuuauucuccucagcauacucacucuuucaagaauaccaaugcuacgguucuucauccaacacacgaguccuaaacgaauuaaacuacgacaaugcaggaaccaaucuauacaaugaacuugaaaugaacuacuacggaaaacaagaaaacugguacucccuaaaaaaaaacucacgaagccuaggagaaaaugacgacggaaacaacgaagacaacgaaaaacuacgaaaacccaaacacaaaaaacuaaaacaacccgccgacggcaauccagauccaaacgcaaacccaaacguagaccccaacgccaacccaaacguagauccaaacgcaaauccaaauguugauccaaaugcaaaccccaacgcaaacccaaacgcaaacccaaacgcaaacccaaacgcaaacccaaacgcaaauccaaaugcaaaucccaacgcaaauccaaacgcaaauccaaaugcaaacccaaacgcuaaucccaacgcuaacccaaacgcaaacccaaacgcaaacccgaacgcuaacccaaacgcaaacccaaacgcaaaccccaacguagacccaaacgcaaacccaaacgcaaaccccaacgcaaacccaaacgcaaacccaaacgcaaaccccaacgcaaaccccaacgcaaacccaaacgccaaccccaaugcaaacccaaacgccaacccaaacgcaaacccaaacgcaaacccaaacgcaaacccaaacgcaaauccaaacgcaaacccaaacgcaaacccaaacgcaaacccaaaugcaaacccaaacaaaaacaaccaaggaaauggacaaggacacaacaugccaaacgacccaaaccguaacguagaugaaaaugccaacgcaaacucagccguaaaaaacaacaacaacgaagaaccuucagacaaacacauaaaagaauacuuaaacaaaauacaaaacucauuaucaacugaauggucccccuguucagucacaugcggaaauggaauacaaguaagaauuaaaccagguucagccaacaaaccaaaagacgaacuagacuacgcaaacgacauugaaaaaaaaauauguaaaauggaaaaauguaguucagucuucaacguaguaaacucaucauccggaggauuauccaaagacauaauaaaacucuuaaaugaacaaguaaacaaagaaaugaacucgagcaaccucuauaugucaaugucauccuggugcuacacccauucccuagacggcgccggacuauuccuguucgaccaugcagcagaagaauaugaacacgcaaaaaagcuaaucaucuucuuaaacgaaaacaaugucccaguacaacuaaccuccauaucagcaccugaacauaaauucgaaggacuaacacaaauauuucaaaaagcauacgaacacgaacaacacauaucagaaucaauuaauaacauaguagaccacgcaaucaaaagcaaggaccacgcaacauucaacuuucuacaaugguacguagcagaacaacaugaagaagaaguacucuucaaagacaucuuagacaaaauugaacucauaggaaacgaaaaucacggacucuaccucgcagaccaguacguaaaaggaaucgcaaaaucacguaaaagcuaaggacuagucccuguucccagagcccacuuuuuuuucuuuuuuugaaauaaaauagccugucuuucagaucuaaaaaaaaaaaaaaaaaaaaaaaaaaaaaaaaaaaaaaaaaaaaaaaaaaaaaaaaaaaaaaaaugcaucccccccccccccccccccccccccccccccaaaggcucuuuucagagccaccagaauu

SEQ ID NO: 9041 - RNA, 1996 nt, Artificial Sequence
  mRNA Design a-3 (A64-N5-C30-hSL-N5) comprising derived and/or modified sequence from Pf(3D7)__XP_001351122.1__HsALB_Pf-CSP(93-384)_L(PVTN)_HBsAg (opt6)
aggagagggcgcuuggcuugcaaggacccugagcugcggcauugaagcacacccaacccaacucgacugaagucagccucacugaaccggaucugagaaucuucucucucugggcuugccagggcucuccgaaccuagcuagcauccucuucaauuccaacuagaaagcuuaccaugaaauggguaacuuuuauaucccuccuauuucuauuuucaucagccuauucaaaacuaaaacaacccgcagauggaaaucccgacccaaaugcaaauccaaauguagauccaaacgccaacccaaaugucgacccaaaugcaaacccaaacguagauccuaacgcaaacccaaaugcuaauccaaacgcuaacccaaacgcaaauccaaaugcuaacccaaacgcaaacccuaacgcaaacccaaacgcuaacccaaacgcaaacccaaacgccaacccaaacgcaaaccccaacgcaaacccuaacgcaaacccaaacgcaaacccaaaugccaacccaaacgcaaacccaaacgcaaacccaaacguagaccccaacgcuaauccaaaugcaaauccaaacgcaaacccaaaugccaacccaaacgccaacccuaaugcaaacccaaacgcaaacccaaaugcaaaccccaacgcaaauccaaacgcaaauccaaaugcaaacccaaacgcuaacccaaacgcaaaccccaaugcaaacccaaacgcaaauccaaaugcaaacccaaaugcaaauccaaaugcaaacccaaauaaaaacaaccaaggaaacggacaaggccauaacaugccaaacgacccaaaccgcaacgucgaugaaaacgccaacgcaaauucagcgguuaaaaacaacaacaaugaagaacccucagacaaacacauaaaagaauacuuaaacaaaauacaaaacucacuaucgacagaaugguccccaugcuccguaaccugcgguaauggaauacaagucagaauaaaaccaggaucagcuaauaaaccaaaagacgaauuagacuacgcaaacgacauagaaaagaaaauaugcaaaauggaaaaauguucuucaguauuuaacguagucaacucaucacccguaacuaacauggaaaacauaaccucaggauuucuagguccuuuacucguacuacaagcaggauuuuuccuacuuacccgaauccuaacaauaccucaaucucuagacucaugguggacaucccuaaauuucuuaggcggaucaccaguuugccucggacaaaacucucaaucaccaacuucaaaucacuccccaacaucuugcccaccaauaugcccaggauaucgauggaugugucuacgacguuuuauaauauuucuauuuauacuacuacucugucuaauauuccuauuaguacuacucgacuaucaaggaaugcuccccgucuguccccucauacccggaucaacaacuacaaacaccggaccgugcaaaaccugcacaaccccagcucaaggaaauucaauguucccaucaugcugcuguacaaaaccaacagauggaaacugcacaugcauaccaaucccaucaagcugggccuuugccaaauauuuaugggaaugggccuccgucagauucucauggcucucccuucuaguuccauucguacaaugguuuguaggccuauccccaaccguauggcuauccgccauauggaugaugugguauuggggaccaucacuauacucaauaguauccccauucauaccacuccuacccauauucuuuugccuauggguauacauuuaaggacuagucccuguucccagagcccacuuuuuuuucuuuuuuugaaauaaaauagccugucuuucagaucuaaaaaaaaaaaaaaaaaaaaaaaaaaaaaaaaaaaaaaaaaaaaaaaaaaaaaaaaaaaaaaaaugcaucccccccccccccccccccccccccccccccaaaggcucuuuucagagccaccagaauu

SEQ ID NO: 9042 - RNA, 1657 nt, Artificial Sequence
  mRNA Design a-3 (A64-N5-C30-hSL-N5) comprising derived and/or modified sequence from Pf(3D7)__XP_001351122.1__HsALB_Pf-CSP(199-377)_L(PVTN)_HBsAg (opt6)
aggagagggcgcuuggcuugcaaggacccugagcugcggcauugaagcacacccaacccaacucgacugaagucagccucacugaaccggaucugagaaucuucucucucugggcuugccagggcucuccgaaccuagcuagcauccucuucaauuccaacuagaaagcuuaccaugaaauggguaacauucauaucauuacucuucuuauuuuccucugcauacucagauccaaaugcaaacccaaaugcaaacccaaacgcaaacccaaaugccaauccaaaugcaaacccaaaugcaaacccaaacgcaaacccaaacgcaaacccaaacgcaaacccuaaugcaaacccaaaugcaaauccaaacgcuaacccaaacgcaaacccaaaugccaacccaaacgccaauccaaacgcaaacccaaacgcaaaucccaaugcaaacccuaacaaaaacaaucaaggaaacggacaaggccacaacaugccaaaugacccaaaccgcaauguagacgaaaaugccaacgcaaacuccgcuguaaaaaacaauaacaacgaagaaccuuccgauaaacauauaaaagaauacuuaaauaaaauacaaaauucauuaucaacagaauggucaccaugcucagucacaugcggaaauggaauacaaguaagaauaaaacccgguuccgcaaacaaaccaaaagacgaacuagacuacgcaaaugacaucgaaaaaaaaauaugcaaaauggaaaaauguucuucaguaccaguaacaaacauggaaaacaucaccucuggauuccuaggaccacuauuaguacuacaagcaggauucuuccuccuaacaagaauauuaacaauaccacaaucacuugacucaugguggacaucccucaauuuccuaggaggauccccaguaugucuaggucaaaacucucaaucuccaacauccaaccauucacccacaucaugcccucccauaugcccaggauaccgauggaugugccucagaagauucauaauauuccuauucauauuacuccuauguuuaaucuuucuacuagucuuauuagacuaccaaggaaugcuaccaguaugcccacuaaucccaggauccacaacaacaaacacaggccccugcaaaacauguacaacaccagcacaaggaaacucaauguucccaucaugcuguugcacaaaaccaacagacggaaacugcacaugcaucccaauaccaucaucuugggcauuugcaaaauacuuaugggaaugggcaucaguacgcuuuucauggcucucccuccucguaccauucguccaaugguucguaggucuaucaccaacaguuuggcuauccgcuauauggaugaugugguauuggggcccuucccuauacucaauaguuucaccauuuauaccacuccuaccaauauuuuucugccuuuggguauacauauaaggacuagucccuguucccagagcccacuuuuuuuucuuuuuuugaaauaaaauagccugucuuucagaucuaaaaaaaaaaaaaaaaaaaaaaaaaaaaaaaaaaaaaaaaaaaaaaaaaaaaaaaaaaaaaaaaugcaucccccccccccccccccccccccccccccccaaaggcucuuuucagagccaccagaauu

SEQ ID NO: 9043 - RNA, 1354 nt, Artificial Sequence
  mRNA Design a-3 (A64-N5-C30-hSL-N5) comprising derived and/or modified sequence from Pf(3D7)__XP_001351122.1__HsALB_Pf-CSP(19-272)_L(AAY)_Pf-CSP(346-3 75)_L(AAY)_Pf-CSP(310-327) (opt6)
aggagagggcgcuuggcuugcaaggacccugagcugcggcauugaagcacacccaacccaacucgacugaagucagccucacugaaccggaucugagaaucuucucucucugggcuugccagggcucuccgaaccuagcuagcauccucuucaauuccaacuagaaagcuuaccaugaaauggguaaccuucauuucacuucucuuccuauucuccagcgcauacucacucuuccaagaauaccaaugcuacggcucaaguuccaacacacgaguacuaaacgaauuaaacuacgacaaugcuggaaccaaccuauacaacgaacucgaaaugaacuacuacgguaaacaagaaaacugguauucacuaaaaaaaaacucaaggucccuaggagaaaacgacgacggaaacaacgaagacaacgaaaaauuaagaaaaccaaaacacaaaaaacuaaaacaacccgcagacggaaaccccgacccaaacgcaaacccaaacguagauccaaacgcaaacccaaacguagacccaaacgcaaacccaaacguagacccaaacgcaaacccuaaugcaaacccaaacgcaaacccaaacgcaaacccaaacgcaaacccaaacgcaaacccaaacgcaaaccccaacgccaacccaaacgcaaacccaaacgcaaacccaaacgcaaacccaaacgcaaacccaaacgcaaacccaaacgcaaacccaaacgcaaacccaaaugcaaacccaaacgcaaacccaaacguagacccaaacgcaaacccaaacgcaaacccaaaugcaaacccaaacgcaaacccaaacgcaaacccaaacgcuaacccaaacgcaaacccaaacgcuaauccaaaugcuaaccccaacgcaaacccaaaugcaaacccaaacgcuaauccaaaugcaaauccaaacgcaaacccaaacgcaaacccaaacgcaaacccaaacgcaaacccaaacgcaaauccagccgcauacauaaaacccggcucagcaaacaaaccaaaagacgaacuagacuacgccaacgacauagaaaaaaaaauaugcaaaauggaaaaaugcucagccgcauacgaaccaucagacaaacacaucaaagaauacuuaaacaaaauacaaaacagcuuauaaggacuagucccuguucccagagcccacuuuuuuuucuuuuuuugaaauaaaauagccugucuuucagaucuaaaaaaaaaaaaaaaaaaaaaaaaaaaaaaaaaaaaaaaaaaaaaaaaaaaaaaaaaaaaaaaaugcaucccccccccccccccccccccccccccccccaaaggcucuuuucagagccaccagaauu

SEQ ID NO: 9044 - RNA, 1402 nt, Artificial Sequence
  mRNA Design a-3 (A64-N5-C30-hSL-N5) comprising derived and/or modified sequence from Pf(3D7)__XP_001351122.1__HsALB_Pf-CSP(19-272)_L(AAY)_Pf-CSP(346-3 75)_L(AAY)_Pf-CSP(310-327)_L(AAY)_PADRE (opt6)
aggagagggcgcuuggcuugcaaggacccugagcugcggcauugaagcacacccaacccaacucgacugaagucagccucacugaaccggaucugagaaucuucucucucugggcuugccagggcucuccgaaccuagcuagcauccucuucaauuccaacuagaaagcuuaccaugaaauggguaacauucauaucacuacuauuccuauucucauccgccuacucacucuuucaagaauaucaaugcuacggaucaagcucaaauacaagaguacuaaacgaacuaaacuacgacaacgcaggaaccaaccuauacaacgaacuagaaaugaacuacuacggaaaacaagaaaacugguacucacuuaaaaaaaacucaagaucacuaggagaaaacgacgacggaaacaacgaagacaacgaaaaacuacgaaaaccaaaacauaaaaaacuaaaacaaccagcagacggaaacccagacccaaacgcaaauccaaacguagacccaaaugcaaacccaaacguagacccaaacgcaaacccaaacguagacccaaaugcaaacccaaacgcaaauccaaacgcaaacccaaacgcaaacccaaacgcaaacccaaacgcaaacccaaacgcaaacccaaaugcaaauccaaacgcaaacccaaaugcaaacccaaacgcaaacccaaacgcgaacccaaacgccaaccccaacgcaaacccaaacgcaaauccaaaugcaaacccaaacgccaauccaaacguagacccaaacgcaaauccaaacgcaaacccaaacgcaaacccaaacgcaaacccuaacgcaaacccaaacgcaaacccaaacgcaaacccaaacgccaacccaaacgcaaaccccaacgcaaacccaaacgcaaacccaaacgcaaaccccaacgcaaauccaaacgcuaacccaaacgcuaaccccaacgcaaacccaaaugcaaacccaaacgccaacccagccgcauacauaaaaccaggaucagcaaauaaaccaaaagacgaacuagacuacgcaaacgacauagaaaaaaaaauaugcaaaauggaaaaaugcuccgcagcauacgaaccaucagacaaacacaucaaagaauaccuaaacaaaauccaaaacucacuagccgccuacgcaaaauuugucgcagcauggacacucaaagcagcagcauaaggacuagucccuguucccagagcccacuuuuuuuucuuuuuuugaaauaaaauagccugucuuucagaucuaaaaaaaaaaaaaaaaaaaaaaaaaaaaaaaaaaaaaaaaaaaaaaaaaaaaaaaaaaaaaaaaugcaucccccccccccccccccccccccccccccccaaaggcucuuuucagagccaccagaauu

SEQ ID NO: 9045 - RNA, 1402 nt, Artificial Sequence
  mRNA Design a-3 (A64-N5-C30-hSL-N5) comprising derived and/or modified sequence from Pf(3D7)__XP_001351122.1__HsALB_Pf-CSP(19-272)_L(AAY)_Pf-CSP(310-3 27)_L(AAY)_Pf-CSP(346-375)_L(AAY)_PADRE (opt6)
aggagagggcgcuuggcuugcaaggacccugagcugcggcauugaagcacacccaacccaacucgacugaagucagccucacugaaccggaucugagaaucuucucucucugggcuugccagggcucuccgaaccuagcuagcauccucuucaauuccaacuagaaagcuuaccaugaaauggguaaccuucauaucccuacuauuucuauucuccucagcauacucacuauuccaagaauaccaaugcuacggcucaucaucaaacacaagaguacuaaaugaacuaaacuacgacaacgccggaaccaaccuauacaaugaacucgaaaugaauuacuacggaaaacaagaaaacugguacucacuaaaaaaaaacucaagaagccuaggagaaaacgacgacggaaacaacgaagacaacgaaaaauuacgaaaaccaaaacauaaaaaacuaaaacaacccgccgacggaaacccagacccaaacgcaaacccaaacguagacccaaacgcaaauccaaacguagacccaaacgcaaauccaaauguagacccaaacgcaaacccaaacgcaaacccaaacgcaaacccaaacgcaaacccgaacgcaaauccaaacgcaaacccaaacgcaaacccaaacgcaaacccaaacgcaaacccaaacgcaaaccccaacgcaaacccaaaugcaaacccaaacgcaaacccaaaugcaaauccaaacgcaaacccaaacgcaaacccaaacgcaaacccaaacguagacccaaaugcaaaccccaacgcaaacccaaacgcaaacccaaacgcaaacccaaacgcaaacccaaacgcaaacccaaacgcaaacccaaacgcaaacccaaacgccaauccaaacgcaaauccaaacgcaaacccaaacgcaaacccaaacgcaaacccaaacgcaaacccaaacgcaaacccaaacgcaaacccaaaugcaaacccaaacgcaaacccagcagcauacgaaccuucagacaaacacauaaaagaauacuuaaacaaaauacaaaacucacuagcagccuacaucaaaccaggauccgcaaacaaaccaaaagacgaacuagacuacgcaaacgacauagaaaaaaaaauauguaaaauggaaaaaugcucagccgcauaugcuaaauucgucgcagcauggaccuuaaaagcagcagcauaaggacuagucccuguucccagagcccacuuuuuuuucuuuuuuugaaauaaaauagccugucuuucagaucuaaaaaaaaaaaaaaaaaaaaaaaaaaaaaaaaaaaaaaaaaaaaaaaaaaaaaaaaaaaaaaaaugcaucccccccccccccccccccccccccccccccaaaggcucuuuucagagccaccagaauu

SEQ ID NO: 9046 - RNA, 1456 nt, Artificial Sequence
  mRNA Design a-3 (A64-N5-C30-hSL-N5) comprising derived and/or modified sequence from Pf(3D7)__XP_001351122.1__HsALB_Pf-CSP(19-272)_L(AAY)_Pf-CSP(310-3 27)_L(AAY)_Pf-CSP(346-375)_L(AAY)_PADRE_L(AAY)_P2 (opt6)
aggagagggcgcuuggcuugcaaggacccugagcugcggcauugaagcacacccaacccaacucgacugaagucagccucacugaaccggaucugagaaucuucucucucugggcuugccagggcucuccgaaccuagcuagcauccucuucaauuccaacuagaaagcuuaccaugaaaugggucaccuucaucucacuacuauuuuuauucuccagcgcauacucauuauuccaagaauaccaaugcuauggcucaagcucaaacacaagaguauuaaacgaacuaaacuacgauaacgccggaacaaaccuauacaacgaacucgaaaugaacuacuauggaaaacaagaaaacugguacucacuuaaaaaaaauucaagaucucuaggagaaaacgacgacggaaacaaugaagacaacgagaaauuaagaaaaccaaaacacaaaaaacuaaaacaaccagcagacggaaacccagacccaaacgcaaacccaaacguagacccaaacgcaaacccaaacguagacccaaacgcaaacccaaacguagauccgaacgcaaauccaaacgcaaauccaaacgcaaacccaaaugcaaacccaaaugcaaacccaaaugcaaacccaaacgcaaacccaaacgcaaacccaaacgcaaaccccaacgcaaacccaaacgcaaauccaaacgcaaacccaaacgcaaacccaaacgcaaaccccaacgcaaacccaaacgcaaacccgaacgcgaacccaaacguggauccaaacgcaaacccaaaugcaaaucccaacgcaaacccaaaugcaaacccaaacgcaaacccaaacgcaaacccaaacgcaaacccaaaugcaaacccaaacgcaaacccaaacgcaaacccaaacgcaaacccaaacgcaaauccaaacgcaaauccaaaugcaaacccaaacgcaaacccaaacgcaaaccccaacgcaaauccaaacgcaaacccagccgcauacgaaccaucagacaaacauauaaaagaauaucuaaacaaaauucaaaacucacucgcagcauacauaaaaccaggaagcgcaaacaaaccuaaagacgaacuagacuacgcaaacgacauagaaaaaaaaauaugcaaaauggaaaaaugcucagcagcguacgcaaaauucguagcagcauggacacuaaaagcagcagccgcagcauaccaauacauaaaagcaaauucaaaauucaucggaauuacagaacuauaaggacuagucccuguucccagagcccacuuuuuuuucuuuuuuugaaauaaaauagccugucuuucagaucuaaaaaaaaaaaaaaaaaaaaaaaaaaaaaaaaaaaaaaaaaaaaaaaaaaaaaaaaaaaaaaaaugcaucccccccccccccccccccccccccccccccaaaggcucuuuucagagccaccagaauu

SEQ ID NO: 9047 - RNA, 1420 nt, Artificial Sequence
  mRNA Design a-3 (A64-N5-C30-hSL-N5) comprising derived and/or modified sequence from Pf(3D7)__XP_001351122.1__HsALB_Pf-CSP(19-272)_L(AAY)_Pf-CSP(310-3 27)_Linker (AAY)_Pf-CSP(346-397) (opt6)
aggagagggcgcuuggcuugcaaggacccugagcugcggcauugaagcacacccaacccaacucgacugaagucagccucacugaaccggaucugagaaucuucucucucugggcuugccagggcucuccgaaccuagcuagcauccucuucaauuccaacuagaaagcuuaccaugaaauggguuacauucauaucauuacuauuccucuuuuccucagcauacucacucuuucaagaauaccaaugcuacggcucauccucaaacacaagaguacucaacgaacucaacuaugacaacgcaggaacaaaccucuacaacgaacuugaaaugaauuacuauggaaaacaagaaaacugguacucauuaaaaaaaaacucaagauccuuaggcgaaaacgacgacggaaacaacgaagacaacgagaaacuccgaaaaccaaaacacaaaaaacuaaaacaaccagcagacggaaacccagacccaaacgcaaacccaaacguagacccaaacgcaaacccaaacguagacccaaacgcaaacccaaacguagacccaaacgcaaacccaaacgcaaacccaaacgcaaacccaaacgcaaacccaaacgcaaacccaaacgcaaacccaaacgcaaacccaaacgcaaacccaaacgcaaacccaaacgcaaacccaaacgccaacccaaacgcaaacccaaacgccaacccaaacgcaaacccaaacgcaaacccaaacgcaaauccaaacgccaacccaaacguagacccaaacgcaaacccaaacgcaaacccaaacgcaaacccaaacgcaaaccccaacgccaacccaaacgccaaccccaacgcaaauccaaacgcaaacccaaacgcaaaccccaacgcaaacccaaacgcaaacccaaacgcaaacccaaacgcuaacccaaacgcaaaccccaacgcaaauccaaacgcaaacccaaacgcaaacccaaaugcaaacccagcagcauaugaaccuucagauaaacacauaaaagaauaccuaaacaaaauccaaaacucucucgcagccuacaucaaaccaggaucagcaaacaaacccaaagacgaacuagacuacgcaaaugauaucgaaaaaaaaauaugcaaaauggaaaaaugcucgagcguauuuaacguaguaaacucaucaaucggacucauaaugguacuaucauuucuauuccucaacuaaggacuagucccuguucccagagcccacuuuuuuuucuuuuuuugaaauaaaauagccugucuuucagaucuaaaaaaaaaaaaaaaaaaaaaaaaaaaaaaaaaaaaaaaaaaaaaaaaaaaaaaaaaaaaaaaaugcaucccccccccccccccccccccccccccccccaaaggcucuuuucagagccaccagaauu

SEQ ID NO: 9048 - RNA, 2020 nt, Artificial Sequence
  mRNA Design a-3 (A64-N5-C30-hSL-N5) comprising derived and/or modified sequence from Pf(3D7)__XP_001351122.1__LumSynt_L(GGS4-GGG)_Pf-CSP(19-397) (opt11)
aggagagggcgcuuggcuugcaaggacccugagcugcggcauugaagcacacccaacccaacucgacugaagucagccucacugaaccggaucugagaaucuucucucucugggcuugccagggcucuccgaaccuagcuagcauccucuucaauuccaacuagaaagcuuaccaugcaaauauacgagggcaaacucacggcugaaggccuacgcuuuggcaucgucgcaucacgguucaaucacgcacucguggacaggcucguagaaggugccaucgacgcaauaguacgccacggcgggcgcgaagaggacauaacgcuaguacgcguacccggaagcugggaaauccccguagccgcaggcgaacucgcacgcaaagaagacaucgacgccgugaucgcaauaggaguccugauccgaggcgcaacaccacacuucgacuacaucgccuccgaagucucaaaaggccuagcggaucugagccucgaacugcgcaaaccuauaacauucggcgucauaacagccgacacauuagaacaggccauagaaagagccggaaccaaacauggaaacaaaggcugggaagcggcccuaagcgccaucgaaauggcaaaccucuucaaaagccugcgcggaggaucaggcggcagcggcggcuccggaggaagcggcggcggucuuuuucaagaauaccaaugcuacggcuccucaucgaacacacgcguacucaaugaacugaacuacgacaaugcaggaaccaaccucuacaacgaacucgagaugaacuacuacggcaaacaagaaaacugguacucgcuaaagaaaaacuccagaucccugggcgaaaacgacgacggaaacaacgaagacaacgaaaaacuacgcaaaccaaaacacaagaaacuaaaacaaccagcagacggaaacccagacccaaacgcgaacccaaacgucgacccaaacgcaaacccaaacguagacccaaacgcaaacccaaacgucgaccccaacgcaaacccaaacgccaaccccaacgcaaaccccaacgcgaacccaaacgcgaaccccaacgcaaacccaaacgcaaaccccaacgcaaacccaaacgcaaacccaaacgccaacccgaaugccaacccgaacgcaaacccgaacgcaaaccccaacgcgaaccccaacgcaaacccaaaugccaaccccaacgcaaaccccaacguagacccgaacgcaaacccgaacgcaaacccgaacgcaaacccaaacgcaaacccaaacgccaaccccaacgccaacccaaacgcgaacccaaaugcaaaccccaacgccaacccgaacgccaacccaaacgcaaacccgaacgcaaaccccaacgcaaaccccaacgcaaaccccaacgcaaacccgaacgccaacccaaacgcaaacccaaacgcaaacccaaacaaaaacaaccaaggaaacgggcaaggccacaacaugcccaacgacccaaaccgaaauguagaugaaaacgcaaacgccaacagcgcggucaaaaacaacaacaacgaagaacccucggacaaacacauaaaagaauaccuaaacaaaauccagaacucccucucaacagaauggucccccugcucaguuaccugcgguaaugguauacaaguccgcauuaaaccgggaucugccaacaaaccaaaagaugagcuagacuacgccaacgacauagaaaagaaaaucugcaaaauggagaaaugcuccucagucuucaacguaguaaacagcucgauagggcucaucaugguacucuccuuuuuauuccucaacuaaggacuagucccuguucccagagcccacuuuuuuuucuuuuuuugaaauaaaauagccugucuuucagaucuaaaaaaaaaaaaaaaaaaaaaaaaaaaaaaaaaaaaaaaaaaaaaaaaaaaaaaaaaaaaaaaaugcaucccccccccccccccccccccccccccccccaaaggcucuuuucagagccaccagaauu

SEQ ID NO: 9049 - RNA, 1882 nt, Artificial Sequence
  mRNA Design a-3 (A64-N5-C30-hSL-N5) comprising derived and/or modified sequence from Pf(3D7)__XP_001351122.1__HsALB_Pf-CSP(19-272)_L(PVTN)_HBsAg (opt11)
aggagagggcgcuuggcuugcaaggacccugagcugcggcauugaagcacacccaacccaacucgacugaagucagccucacugaaccggaucugagaaucuucucucucugggcuugccagggcucuccgaaccuagcuagcauccucuucaauuccaacuagaaagcuuaccaugaaaugggucaccuucaucucccuccucuuccucuucuccucugccuacucacucuuccaagaauaccaaugcuacggcuccucuuccaacacccgcguacucaacgaacucaacuaugacaaugcaggaaccaaccuauacaacgagcuagagaugaacuacuacggcaaacaagaaaacugguacucccucaagaaaaacucacgcucccuuggcgaaaaugacgacggcaacaacgaagacaacgaaaaacuucgcaaacccaaacacaagaaauuaaaacaaccagccgacggcaacccagaccccaacgccaaccccaacgucgaccccaacgccaacccuaacgucgaccccaacgcaaacccuaacgucgauccaaacgccaaccccaacgcuaaccccaacgcaaauccgaacgcaaaccccaacgccaacccuaacgccaaccccaacgccaacccaaacgccaaccccaacgcuaaccccaacgcaaacccgaacgccaaccccaacgccaaccccaacgcaaaccccaacgccaaccccaaugcaaaccccaacgccaacccaaaugccaaccccaacgucgaccccaacgcaaaccccaacgcuaacccuaacgcuaacccaaacgccaacccaaacgcuaaccccaacgccaaccccaacgccaaccccaacgcaaacccaaacgcaaacccuaacgccaacccuaacgcaaaccccaacgcgaaccccaacgcaaaccccaacgcaaaccccaacgccaaccccaacgccaacccaaacgccaauccaaacgcaaaucccccagucaccaacauggaaaacaucaccucaggcuuccucggcccccuucucguccuacaagcugguuucuuccuucuaacccgcauccucacgaucccccaaucccucgacucaugguggaccucacucaacuuucucggaggcucacccguaugccucggacaaaacucccaaucccccaccuccaaccauuccccaaccucaugcccaccaauaugccccggcuaccguuggaugugccuccgccguuucaucauauuccuuuucauacuccuccucugccucaucuuccugcucgugcuccuagacuaucaagguaugcuacccguaugcccacucauccccggcucaaccacgacaaacacuggccccugcaaaacaugcaccacacccgcacaaggaaacuccauguuccccucaugcugcugcaccaaaccaacagacggaaacuguaccugcaucccuauccccuccuccugggccuucgcaaaauaucuaugggagugggccagcguacgcuuuuccuggcuuucccuccugguccccuucguccaaugguucguaggccucuccccaaccguauggcuauccgcaaucuggaugaugugguacuggggcccaucucucuacucaauaguaucacccuucaucccacuccuccccaucuucuucugccucuggguauacaucuaaggacuagucccuguucccagagcccacuuuuuuuucuuuuuuugaaauaaaauagccugucuuucagaucuaaaaaaaaaaaaaaaaaaaaaaaaaaaaaaaaaaaaaaaaaaaaaaaaaaaaaaaaaaaaaaaaugcaucccccccccccccccccccccccccccccccaaaggcucuuuucagagccaccagaauu

SEQ ID NO: 9050 - RNA, 1999 nt, Artificial Sequence
  mRNA Design a-3 (A64-N5-C30-hSL-N5) comprising derived and/or modified sequence from Pf(3D7)__XP_001351122.1__HsALB_Pf-CSP(19-272)_L(AAY)_Pf-CSP(346-3 65)_L(AAY)_PADRE_L(PVTN)_HBsAg (opt11)
aggagagggcgcuuggcuugcaaggacccugagcugcggcauugaagcacacccaacccaacucgacugaagucagccucacugaaccggaucugagaaucuucucucucugggcuugccagggcucuccgaaccuagcuagcauccucuucaauuccaacuagaaagcuuaccaugaaauggguaaccuucauaucccuucuauucuuauucucuuccgcauacucccucuuccaagaauaucagugcuacggcucauccucaaacacacgaguccucaacgaacucaacuacgacaacgccggcaccaaucucuacaacgaacucgaaaugaacuacuacggcaaacaagaaaacugguacucccuuaagaaaaacucacgcucucucggcgaaaacgacgacggcaacaacgaagacaacgaaaaauuacgcaaacccaaacacaagaaacucaaacaaccagccgacggcaacccagaccccaaugcaaacccuaacgucgaccccaacgccaacccuaacgucgacccaaacgccaacccgaacgucgaccccaacgcaaacccaaacgccaaccccaaugccaaucccaacgccaacccuaacgccaaccccaacgccaaccccaacgccaacccuaacgccaaccccaaugcaaacccaaacgccaacccaaacgcaaacccaaacgccaauccaaacgccaacccaaacgccaaccccaacgccaacccaaacgccaaucccaacgccaaccccaacguagaccccaaugcgaacccaaacgccaacccuaacgccaaccccaacgcaaacccaaacgcuaacccaaacgcaaaccccaacgcaaaccccaacgcaaacccgaacgcgaaccccaacgccaauccaaacgcaaacccuaacgcaaacccaaacgccaacccaaacgccaacccaaacgcaaacccaaacgccaauccaaacgcaaacccgaacgcaaaccccgccgcuuacaucaaacccggaucggccaacaaacccaaagacgaacuugauuacgccaacgacaucgaagcagccuacgcaaaauucguagcggccuggacccuaaaagcagcagcacccgucacaaacauggaaaacaucacaucuggcuucuuaggcccacuccuaguccuccaggccggcuucuuccuacuaacccguauacucaccauaccacaaucacucgacucaugguggaccucccuaaacuuccucggcggaucacccgucugccugggccaaaacucgcaaucccccaccucaaaucauucgcccacaucaugcccgcccaucugccccggcuaccgguggaugugccuccgcagauucauaaucuuccucuucauacuacuacuuugccuaaucuuccucuuaguccuacucgacuaccaaggcaugcuccccgucugcccccuuauacccggcuccaccaccaccaauaccggccccugcaaaaccugcacaacacccgcccaaggcaacucaauguucccguccugcuguugcaccaaaccaaccgacggaaauugcacaugcaucccaauccccucaucaugggcauucgccaaauaccucugggaaugggccuccguccguuucuccuggcucagccuacucguucccuucguccaaugguuugucggccuuucaccuacaguauggcuauccgccauauggaugaugugguacuggggacccucacucuacucaauugucucccccuucaucccauuacuccccaucuucuucugccucugggucuacauauaaggacuagucccuguucccagagcccacuuuuuuuucuuuuuuugaaauaaaauagccugucuuucagaucuaaaaaaaaaaaaaaaaaaaaaaaaaaaaaaaaaaaaaaaaaaaaaaaaaaaaaaaaaaaaaaaaugcaucccccccccccccccccccccccccccccccaaaggcucuuuucagagccaccagaauu

SEQ ID NO: 9051 - RNA, 2218 nt, Artificial Sequence
  mRNA Design a-3 (A64-N5-C30-hSL-N5) comprising derived and/or modified sequence from Pf(3D7)__XP_001351122.1__HsALB_Pf-CSP(19-384)_L(PVTN)_HBsAg (opt11)
aggagagggcgcuuggcuugcaaggacccugagcugcggcauugaagcacacccaacccaacucgacugaagucagccucacugaaccggaucugagaaucuucucucucugggcuugccagggcucuccgaaccuagcuagcauccucuucaauuccaacuagaaagcuuaccaugaaaugggucaccuucauaucacuccuauuccuauuuucaagcgccuacucccucuuccaagaauaucaaugcuauggcucaagcucaaacacccgcguccucaacgagcuaaacuacgacaacgcaggaaccaaccucuacaacgaacuggaaaugaacuacuacggaaaacaagagaacugguacuccuuaaagaaaaacucccgcucccucggcgaaaacgaugacgguaacaacgaagacaaugaaaaacuccgaaaacccaaacacaagaaacuaaaacaaccagccgacggaaaccccgacccgaacgcaaaccccaacguagacccaaacgcaaacccuaauguagacccaaacgccaacccaaacgucgacccaaacgcaaacccaaacgcuaaccccaacgccaacccaaacgccaaccccaacgccaaccccaaugccaacccaaacgcgaaccccaacgcaaaccccaacgccaacccgaacgccaacccaaacgccaacccaaacgccaaccccaacgcgaacccaaacgccaacccaaacgcuaaccccaacgcaaaccccaacgccaacccuaacgucgacccaaacgccaaucccaacgccaaccccaacgcaaaccccaacgccaacccgaacgcgaaccccaacgcaaaccccaacgcaaacccaaacgccaaccccaacgccaacccaaacgccaacccgaacgccaacccaaacgcgaaucccaaugccaaccccaacgccaauccuaaugcaaacccaaacgcaaaccccaacgccaauccgaacgcaaacccgaacaaaaacaaccaagguaacggccaaggccacaacaugcccaacgaccccaaccgcaacgucgacgaaaacgcaaacgccaacuccgcaguuaaaaacaacaacaacgaagaaccaucagacaaacacauaaaagaauaccucaacaaaauccaaaacucgcucuccaccgaauggucccccuguagcguaaccugcgguaauggaauacaaguccgaaucaaaccaggcucugccaacaaacccaaagacgaacuagacuacgccaacgacauugaaaagaaaaucugcaaaauggaaaaauguagcuccgucuucaacguagucaacuccucccccguuaccaacauggagaacauaaccuccggcuuccucggcccccuucucgugcuacaggccggauucuuccuccuaaccaggauccuaaccaucccccagucacucgacuccugguggaccucacucaacuuccucggcggaucccccgucugccucggacaaaacucccaaucccccaccucaaaccacuccccaaccucuugcccgcccauaugccccgguuaccgcuggaugugccuucgccgcuucaucauauuucuauucauccuccuucucugccuaauauuccuacucguacuccucgacuaccaaggcaugcuacccgucugcccucuuauacccggauccacgacaaccaacaccggccccugcaaaaccugcaccacacccgcccaaggcaacucuauguuccccucaugcugcugcacaaaacccaccgacggcaacugcacaugcauaccaauccccucuuccugggccuuugccaaauaccuuugggaaugggcuuccguccguuuuuccugguuaucccuccuggucccauucguccaaugguucgucggccuuucaccaaccgucuggcuauccgccaucuggaugaugugguacuggggucccucccucuacagcaucgucucaccauuuaucccccuccugcccaucuucuucugcuuguggguauacauaugaggacuagucccuguucccagagcccacuuuuuuuucuuuuuuugaaauaaaauagccugucuuucagaucuaaaaaaaaaaaaaaaaaaaaaaaaaaaaaaaaaaaaaaaaaaaaaaaaaaaaaaaaaaaaaaaaugcaucccccccccccccccccccccccccccccccaaaggcucuuuucagagccaccagaauu

SEQ ID NO: 9052 - RNA, 2035 nt, Artificial Sequence
  mRNA Design a-3 (A64-N5-C30-hSL-N5) comprising derived and/or modified sequence from Pf(3D7)__XP_001351122.1__HsALB_Pf-CSP(19-384)_L(SGG)_Ferritin (opt11)
aggagagggcgcuuggcuugcaaggacccugagcugcggcauugaagcacacccaacccaacucgacugaagucagccucacugaaccggaucugagaaucuucucucucugggcuugccagggcucuccgaaccuagcuagcauccucuucaauuccaacuagaaagcuuaccaugaaaugggucaccuucauaucacuacuuuuccuguucuccucagcauacucacucuuccaagaguaccaaugcuacggcucaucauccaauacccgcguacuuaacgaauuaaacuacgacaacgcaggcaccaaccucuacaacgaacucgaaaugaacuauuacggaaaacaagaaaacugguacucacuaaagaaaaacagcagaucccucggcgaaaacgacgacggcaauaacgaagacaacgaaaaacugagaaaaccuaaacacaagaaacucaaacaacccgcagacggcaaccccgaccccaacgccaacccaaacguagaccccaacgccaaccccaacgucgaccccaacgccaacccuaaugucgacccaaacgcaaacccuaacgcaaaccccaaugccaacccaaacgccaaccccaacgcaaaccccaacgcaaauccaaacgcaaaucccaacgcaaaccccaaugccaaccccaacgcaaacccaaacgccaaccccaacgcaaaccccaacgcuaacccaaacgccaacccaaacgcaaacccaaacgccaaccccaacgcuaaccccaacgucgaccccaacgccaaccccaacgcaaacccaaacgccaaccccaaugcaaacccaaacgccaaccccaacgcaaacccaaacgccaacccaaacgccaaccccaacgcaaaccccaacgcuaaccccaacgcaaaccccaaugcaaacccgaacgccaacccaaacgcaaacccaaacgccaacccaaacgccaaccccaacgccaacccaaacgccaacccaaacaaaaacaaccaagguaacggacaaggccacaacaugcccaacgauccuaaccgcaacguagacgaaaacgccaacgcaaacagcgcagucaaaaacaacaacaacgaggaaccaucagacaaacacaucaaagaauaccucaacaaaauccaaaacucccuauccacagaauggucacccugcuccguaaccugcggcaacggcauccaaguacgcaucaaacccggauccgcaaacaaaccaaaagaugaauuagauuaugcaaacgacauagaaaagaaaauaugcaaaauggaaaaaugcuccuccguauucaacguagucaacuccucuucagggggacucuccaaagacaucaucaaacuucucaacgaacaagucaacaaagagaugaacagcuccaaccucuacaugucaaugucaagcuggugcuacacacacucacuggacggcgccggccucuuccuauucgaccacgccgcagaagaauacgaacacgccaagaaacuuauaaucuuccuaaacgaaaauaacguaccuguccaacucacaucaaucucggccccagaacauaaauucgaagggcucacgcaaauauuucaaaaagcauacgaacacgaacagcacaucuccgaaucaaucaacaacauugucgaccacgcaaucaaauccaaagaccacgccacauucaacuuccuacaaugguacguggccgaacaacacgaagaagaaguccucuucaaagacauacuagacaaaaucgaacuaaucggcaacgaaaaccacggccucuaccuagccgaccaauacguaaaaggaaucgcgaaaucccgcaaauccuaaggacuagucccuguucccagagcccacuuuuuuuucuuuuuuugaaauaaaauagccugucuuucagaucuaaaaaaaaaaaaaaaaaaaaaaaaaaaaaaaaaaaaaaaaaaaaaaaaaaaaaaaaaaaaaaaaugcaucccccccccccccccccccccccccccccccaaaggcucuuuucagagccaccagaauu

SEQ ID NO: 9053 - RNA, 1996 nt, Artificial Sequence
  mRNA Design a-3 (A64-N5-C30-hSL-N5) comprising derived and/or modified sequence from Pf(3D7)__XP_001351122.1__HsALB_Pf-CSP(93-384)_L(PVTN)_HBsAg (opt11)
aggagagggcgcuuggcuugcaaggacccugagcugcggcauugaagcacacccaacccaacucgacugaagucagccucacugaaccggaucugagaaucuucucucucugggcuugccagggcucuccgaaccuagcuagcauccucuucaauuccaacuagaaagcuuaccaugaaaugggucaccuuuaucucacuccuauuucucuucucuuccgcauacuccaaacucaaacaacccgcagacggaaaccccgacccaaacgcaaaccccaacguagaccccaacgccaaccccaacgucgaccccaacgccaaccccaacguagaccccaacgcaaaccccaacgccaacccaaacgccaaccccaacgccaaccccaacgccaaucccaacgccaacccaaacgcaaaucccaacgcaaaccccaacgccaaccccaacgccaacccaaacgccaauccaaacgcaaacccuaacgccaacccuaacgcgaaccccaacgccaaccccaacgcaaaccccaacgccaaccccaaugucgaccccaacgccaaccccaacgccaaccccaacgcaaaccccaacgcaaacccaaacgccaaucccaacgccaaccccaacgcaaacccuaacgccaaccccaaugccaauccuaacgccaaccccaacgccaacccuaacgccaacccaaacgccaaccccaacgccaaccccaacgccaacccuaacgccaacccuaacgccaacccaaacgccaauccaaacaagaacaaccaaggcaacggucaaggccacaauaugccaaacgacccaaaccgaaacguagacgaaaacgccaacgccaacuccgccgucaaaaacaacaacaacgaagaacccuccgacaaacacaucaaagaauaucugaacaaaauccaaaacucccucuccaccgaauggucccccugcuccgucacuuguggcaauggcauacaaguccgcaucaaacccggcucagccaacaaacccaaagacgaacucgacuacgcaaacgacaucgaaaagaaaauaugcaaaauggaaaaaugcuccucugucuucaacgucgucaacuccucgcccguaaccaacauggaaaacaucaccucaggauuccucggcccccuacucguccuccaagccggcuucuuccuccucacccgaauccuuacaaucccccaaucccuugacucaugguggaccucccuuaauuuccucggcgguucccccgucugccuuggccaaaacucacaaucccccaccucaaaccacucccccacuuccugcccgcccauaugccccggcuaccgcuggaugugccuccgccgguucaucauauuccucuucauccuacuccucugccuuauauuucuauuaguccuccuagacuaccaaggaaugcuccccguaugcccacuaauccccggauccaccaccaccaacaccggccccugcaaaaccugcaccaccccugcacaaggaaacuccauguucccaucuuguugcugcacaaaaccaaccgacggcaacuguaccugcauccccaucccuucaucaugggccuucgccaaauaccuaugggaaugggccucaguacguuucuccuggcuaucccuccucgucccauucguucaaugguucgucggccuaucccccacgguauggcucuccgcaauauggaugaugugguacuggggccccucacuauacaguauaguuucccccuucauaccccuccuccccauauucuucugccucuggguauacaucuagggacuagucccuguucccagagcccacuuuuuuuucuuuuuuugaaauaaaauagccugucuuucagaucuaaaaaaaaaaaaaaaaaaaaaaaaaaaaaaaaaaaaaaaaaaaaaaaaaaaaaaaaaaaaaaaaugcaucccccccccccccccccccccccccccccccaaaggcucuuuucagagccaccagaauu

SEQ ID NO: 9054 - RNA, 1657 nt, Artificial Sequence
  mRNA Design a-3 (A64-N5-C30-hSL-N5) comprising derived and/or modified sequence from Pf(3D7)__XP_001351122.1__HsALB_Pf-CSP(199-377)_L(PVTN)_HBsAg (opt11)
aggagagggcgcuuggcuugcaaggacccugagcugcggcauugaagcacacccaacccaacucgacugaagucagccucacugaaccggaucugagaaucuucucucucugggcuugccagggcucuccgaaccuagcuagcauccucuucaauuccaacuagaaagcuuaccaugaaauggguaaccuucaucucccuccuauucuuauucucaucagccuacuccgacccaaacgcaaaccccaaugccaaccccaacgccaaccccaacgccaaucccaacgccaaccccaacgccaaucccaaugcuaaccccaacgccaacccaaacgccaacccaaacgcaaaccccaacgccaaccccaacgccaaccccaacgccaacccaaacgccaaccccaacgcaaaccccaacgccaacccaaacgccaaccccaacgccaacccaaacaaaaacaaucaaggcaacggccaaggacacaacaugcccaacgaccccaaccgcaacgucgacgaaaacgcaaacgccaacucugcagucaaaaacaacaacaacgaagaacccuccgacaaacacauaaaagaauaccucaacaaaauccaaaacucccucuccacagaaugguccccaugcuccgucacgugcggcaacggcauccaaguacgcaucaaacccggcucugccaacaaaccuaaagacgaacucgacuacgccaacgacaucgaaaagaaaaucugcaaaauggaaaaaugcuccucaguccccguaacuaacauggaaaacaucacguccggcuuccucggcccccuccuaguccuccaagccggcuucuuccuacucacacgcauucuuaccaucccgcaaucacucgacuccugguggaccucccucaacuucuuaggcggcuccccugucugccucggccaaaacucacaaucccccacuucaaaccacucacccaccagcugcccacccauaugcccaggauaccgcuggaugugccuccgccguuucauaaucuuccucuucauacuccuacucugccuaaucuuccuccucguacuccuagacuaccaaggcaugcuccccgucugcccacucauccccggaagcacuacaaccaacaccggccccugcaaaacaugcaccacccccgcacaaggcaacuccauguuccccuccugcugcugcacaaaacccacugauggcaacugcacuugcauccccauccccuccucaugggccuucgccaaauaucucugggaaugggccagcguccgguucucuuggcucucacuccuaguccccuucguucaaugguucguaggccuaucccccaccgucuggcucuccgcaauauggaugaugugguauuggggccccucccucuacuccauuguaucccccuucaucccacuacuccccaucuucuucugccuuugggucuacauauaaggacuagucccuguucccagagcccacuuuuuuuucuuuuuuugaaauaaaauagccugucuuucagaucuaaaaaaaaaaaaaaaaaaaaaaaaaaaaaaaaaaaaaaaaaaaaaaaaaaaaaaaaaaaaaaaaugcaucccccccccccccccccccccccccccccccaaaggcucuuuucagagccaccagaauu

SEQ ID NO: 9055 - RNA, 1354 nt, Artificial Sequence
  mRNA Design a-3 (A64-N5-C30-hSL-N5) comprising derived and/or modified sequence from Pf(3D7)__XP_001351122.1__HsALB_Pf-CSP(19-272)_L(AAY)_Pf-CSP(346-3 75)_L(AAY)_Pf-CSP(310-327) (opt11)
aggagagggcgcuuggcuugcaaggacccugagcugcggcauugaagcacacccaacccaacucgacugaagucagccucacugaaccggaucugagaaucuucucucucugggcuugccagggcucuccgaaccuagcuagcauccucuucaauuccaacuagaaagcuuaccaugaaauggguaaccuucaucucacuccuauuccuguucuccagugcauacucacucuuccaagaauaccaaugcuacggcuccagcagcaacacgcgaguccucaacgaacuaaacuacgauaacgccggaaccaaccuuuacaacgaacucgaaaugaacuacuacggcaaacaagaaaacugguacucacuaaaaaaaaacagcagaucacuaggcgaaaacgacgacggaaacaacgaagacaacgaaaaacuacgcaagcccaaacacaagaaacucaaacaacccgcagacggaaacccagaccccaacgcaaaccccaacguagaccccaacgcaaaccccaacguagaccccaacgcaaaucccaacguagacccaaacgcaaaccccaacgcaaacccaaacgcaaacccaaacgcgaacccaaacgcaaacccaaacgcaaacccgaacgccaacccaaacgcaaacccaaacgcuaaccccaacgcaaacccaaacgcaaacccaaacgcaaacccaaacgcaaacccaaacgcaaacccaaacgcaaacccgaacgcaaacccaaacgcaaaccccaacguagacccaaacgccaacccaaacgcaaaccccaacgccaacccaaacgcaaacccaaacgcaaacccaaacgcaaacccaaacgcaaacccaaacgcaaacccaaacgcaaaccccaacgcgaacccaaacgccaacccaaacgcaaacccaaacgcgaacccaaacgccaaccccaacgcaaaccccaacgcaaaccccaacgcaaacccaaacgcaaaccccgccgcuuacauaaaacccggcucggccaauaaaccaaaagacgaacucgacuacgccaacgacauagaaaaaaaaauaugcaaaauggaaaaaugcagcgccgccuacgaaccaucagacaaacacaucaaagaauaccucaacaaaauacaaaacagccucuaaggacuagucccuguucccagagcccacuuuuuuuucuuuuuuugaaauaaaauagccugucuuucagaucuaaaaaaaaaaaaaaaaaaaaaaaaaaaaaaaaaaaaaaaaaaaaaaaaaaaaaaaaaaaaaaaaugcaucccccccccccccccccccccccccccccccaaaggcucuuuucagagccaccagaauu

SEQ ID NO: 9056 - RNA, 1402 nt, Artificial Sequence
  mRNA Design a-3 (A64-N5-C30-hSL-N5) comprising derived and/or modified sequence from Pf(3D7)__XP_001351122.1__HsALB_Pf-CSP(19-272)_L(AAY)_Pf-CSP(346-3 75)_L(AAY)_Pf-CSP(310-327)_L(AAY)_PADRE (opt11)
aggagagggcgcuuggcuugcaaggacccugagcugcggcauugaagcacacccaacccaacucgacugaagucagccucacugaaccggaucugagaaucuucucucucugggcuugccagggcucuccgaaccuagcuagcauccucuucaauuccaacuagaaagcuuaccaugaaauggguaacauuuaucucccuccucuuccucuuuuccuccgcauacucacucuuccaagaauaccaaugcuacggaucaagcuccaacacccgcguccuuaacgaacuuaacuacgacaacgccggcaccaacuuauacaacgaacucgagaugaacuacuacggcaaacaagaaaacugguacucccucaaaaaaaacuccagaucccucggcgaaaacgacgacggaaacaacgaagacaacgaaaaacuccgcaaacccaaacacaaaaaacucaaacaacccgcugacggcaacccugaccccaacgccaaccccaacguagaccccaacgccaaucccaacguagacccaaacgccaaccccaacguagaccccaacgccaaccccaacgcaaacccaaacgccaaccccaacgccaaccccaacgcgaacccaaacgccaaccccaacgccaacccuaacgccaacccgaacgccaaccccaacgccaaccccaacgccaaccccaacgcgaaccccaacgcaaaccccaacgccaaccccaacgcaaaccccaacgccaaccccaacgccaaccccaacguagaccccaacgccaacccaaacgccaacccaaacgcaaaccccaacgccaauccaaacgcaaaccccaacgcaaaccccaaugccaacccaaacgccaaccccaacgccaacccaaacgccaacccaaacgccaaccccaacgcaaacccaaacgcaaaccccaacgcaaacccuaacgccaacccaaacgccaacccaaacgcaaaccccaacgcaaaccccgccgccuacaucaaaccaggcuccgccaauaaaccaaaagacgaacucgacuacgcaaaugacauagaaaaaaaaauaugcaaaauggaaaaaugcuccgcagccuacgaacccagcgacaaacauaucaaagaauacuuaaacaaaauccaaaacucccuagccgccuacgccaaauucgucgcagccuggacccucaaagccgccgccuaaggacuagucccuguucccagagcccacuuuuuuuucuuuuuuugaaauaaaauagccugucuuucagaucuaaaaaaaaaaaaaaaaaaaaaaaaaaaaaaaaaaaaaaaaaaaaaaaaaaaaaaaaaaaaaaaaugcaucccccccccccccccccccccccccccccccaaaggcucuuuucagagccaccagaauu

SEQ ID NO: 9057 - RNA, 1402 nt, Artificial Sequence
  mRNA Design a-3 (A64-N5-C30-hSL-N5) comprising derived and/or modified sequence from Pf(3D7)__XP_001351122.1__HsALB_Pf-CSP(19-272)_L(AAY)_Pf-CSP(310-3 27)_L(AAY)_Pf-CSP(346-375)_L(AAY)_PADRE (opt11)
aggagagggcgcuuggcuugcaaggacccugagcugcggcauugaagcacacccaacccaacucgacugaagucagccucacugaaccggaucugagaaucuucucucucugggcuugccagggcucuccgaaccuagcuagcauccucuucaauuccaacuagaaagcuuaccaugaaaugggugaccuuuaucucacuccucuuccucuucucaagcgcauacucacucuuccaagaauaccaaugcuacgguucaagcucaaacacaagaguccucaacgaacucaacuacgacaacgccggaaccaaccucuacaacgaacucgaaaugaacuacuacggcaaacaagaaaacugguacucacucaaaaaaaacagcaggucccuaggcgaaaacgacgacggaaacaacgaagacaacgaaaaacuccgcaaaccaaaacacaaaaaacugaaacaacccgcagacggaaacccagaccccaacgcaaacccgaacgucgacccgaacgccaacccaaacguagacccaaacgcaaaccccaacgucgacccaaacgcaaacccaaacgcaaacccaaacgcaaacccgaacgcaaacccaaacgcgaacccaaacgcaaacccaaacgcaaacccaaacgccaacccaaacgcaaacccaaaugcaaaccccaacgcaaacccgaacgcaaacccaaacgcaaaccccaacgcaaacccaaacgcuaacccaaacgcgaaccccaacgcaaacccaaacguggacccaaacgcaaacccaaacgcaaacccaaacgcgaacccgaacgcaaacccaaacgcgaacccaaacgcaaaccccaacgcaaacccaaacgcaaacccaaacgccaacccaaacgcaaacccaaacgcgaaccccaacgccaacccaaacgcaaacccaaacgcaaacccaaacgcaaacccaaacgcaaacccaaacgccaacccaaacgcaaacccagcugccuacgaacccuccgacaaacacaucaaagaguaccugaacaaaauccaaaacucccucgcagccuacaucaagcccggauccgcaaacaaacccaaagacgaacucgacuacgccaacgacauagaaaaaaaaaucugcaaaauggaaaaaugcucagccgcauacgcaaaauucguagcagccuggacccuaaaagcggcagcauaaggacuagucccuguucccagagcccacuuuuuuuucuuuuuuugaaauaaaauagccugucuuucagaucuaaaaaaaaaaaaaaaaaaaaaaaaaaaaaaaaaaaaaaaaaaaaaaaaaaaaaaaaaaaaaaaaugcaucccccccccccccccccccccccccccccccaaaggcucuuuucagagccaccagaauu

SEQ ID NO: 9058 - RNA, 1456 nt, Artificial Sequence
  mRNA Design a-3 (A64-N5-C30-hSL-N5) comprising derived and/or modified sequence from Pf(3D7)__XP_001351122.1__HsALB_Pf-CSP(19-272)_L(AAY)_Pf-CSP(310-3 27)_L(AAY)_Pf-CSP(346-375)_L(AAY)_PADRE_L(AAY)_P2 (opt11)
aggagagggcgcuuggcuugcaaggacccugagcugcggcauugaagcacacccaacccaacucgacugaagucagccucacugaaccggaucugagaaucuucucucucugggcuugccagggcucuccgaaccuagcuagcauccucuucaauuccaacuagaaagcuuaccaugaaaugggugaccuucauaucacuauuauuccucuucucaagcgcauacucacucuuccaagaauaccaaugcuacggcuccuccucaaacacgcgcguacucaacgaacuaaacuacgacaacgccggaacaaaccucuacaacgaacuagaaaugaacuacuacggcaaacaagaaaacugguacucccuaaaaaaaaacucaagaucccuaggcgagaaugacgacggcaacaacgaagacaacgaaaaacuccgcaaacccaaacacaaaaaacucaaacaacccgccgacggaaacccagacccaaacgccaacccaaacgucgacccaaacgcaaaccccaacguagaccccaacgcaaacccaaacguagacccaaacgcaaacccaaacgcaaacccaaacgcaaaccccaacgccaacccaaacgcaaacccaaacgccaauccaaacgcaaacccaaaugccaacccaaacgcaaacccaaacgcaaacccaaacgccaaccccaacgcaaacccaaacgcaaacccaaacgccaacccaaacgcaaacccaaacgcaaaccccaacgccaacccgaacguagaccccaacgcaaaccccaacgcaaacccaaacgccaauccaaacgcaaaccccaacgcaaaccccaacgcaaaccccaacgccaauccaaacgccaaccccaacgcgaacccgaacgcaaacccaaacgcaaacccaaacgcaaacccaaacgcaaacccaaacgcaaacccaaacgcaaacccgaacgcaaaccccaacgccaacccaaacgcaaacccagccgcauacgaacccucagacaaacacauaaaagaauaccuaaacaaaauccaaaacucacucgcugccuacaucaaaccaggaagcgcaaacaaacccaaagacgaacucgauuacgccaacgacaucgaaaaaaaaaucugcaaaauggaaaaaugcuccgccgccuacgcaaaauucgucgcagccuggacucuaaaagccgccgcagccgcauaccaauacauaaaagccaacucaaaauucaucggaaucaccgaacuguaaggacuagucccuguucccagagcccacuuuuuuuucuuuuuuugaaauaaaauagccugucuuucagaucuaaaaaaaaaaaaaaaaaaaaaaaaaaaaaaaaaaaaaaaaaaaaaaaaaaaaaaaaaaaaaaaaugcaucccccccccccccccccccccccccccccccaaaggcucuuuucagagccaccagaauu

SEQ ID NO: 9059 - RNA, 1420 nt, Artificial Sequence
  mRNA Design a-3 (A64-N5-C30-hSL-N5) comprising derived and/or modified sequence from Pf(3D7)__XP_001351122.1__HsALB_Pf-CSP(19-272)_L(AAY)_Pf-CSP(310-3 27)_Linker (AAY)_Pf-CSP(346-397) (opt11)
aggagagggcgcuuggcuugcaaggacccugagcugcggcauugaagcacacccaacccaacucgacugaagucagccucacugaaccggaucugagaaucuucucucucugggcuugccagggcucuccgaaccuagcuagcauccucuucaauuccaacuagaaagcuuaccaugaaaugggucaccuucaucucacuccuguuccuauucucgagcgcauacucccucuuccaagaauaccagugcuacggcucaagcucaaacacacgcguacucaacgaacuaaacuacgacaacgccggaaccaaccucuacaacgaacuagaaaugaacuacuacggcaaacaagagaacugguacucucuaaagaaaaacagcagaucccugggcgagaacgacgacggaaacaacgaagacaacgagaaacuacgcaaacccaaacacaagaaacuaaaacaacccgcagauggaaacccagauccaaacgcaaacccaaacgucgacccuaacgcaaaccccaacguagaccccaacgcaaaccccaacguagacccaaacgccaacccaaacgccaacccaaacgccaacccgaacgcaaaccccaaugccaacccaaacgccaacccgaacgccaacccaaacgcgaaccccaacgccaacccaaacgcaaacccaaacgcaaacccuaacgcaaaccccaacgccaacccaaaugccaacccaaacgcaaacccaaacgcaaacccaaacgccaaccccaacguagacccaaacgcaaaccccaacgcaaacccaaacgcaaacccaaacgccaacccaaacgcaaacccaaacgcaaacccaaacgcaaacccgaacgccaaccccaacgcaaacccaaacgcaaacccaaacgccaacccaaacgccaacccaaacgcaaaccccaacgcaaaccccaacgccaaccccaacgccaacccaaacgcaaacccaaacgcaaacccagccgcauacgaacccucagacaaacacauaaaagaauaccucaauaaaauccaaaacucacuugcagccuacauaaaaccaggcagcgcgaacaaacccaaagacgaacucgacuacgcgaacgacauagaaaagaaaaucugcaaaauggaaaaaugcucauccgucuucaaugucguaaacucauccauaggccuaaucaugguccucuccuuccuauuccucaacuaaggacuagucccuguucccagagcccacuuuuuuuucuuuuuuugaaauaaaauagccugucuuucagaucuaaaaaaaaaaaaaaaaaaaaaaaaaaaaaaaaaaaaaaaaaaaaaaaaaaaaaaaaaaaaaaaaugcaucccccccccccccccccccccccccccccccaaaggcucuuuucagagccaccagaauu

SEQ ID NO: 9060 - RNA, 1864 nt, Artificial Sequence
  mRNA Design i-3 (A64-N5-C30-hSL-N5) comprising derived and/or modified sequence from Pf(3D7)__XP_001351122.1__LumSynt_L(GGS4-GGG)_Pf-CSP(19-397) (opt1)
aggagaaagcuuaccaugcagaucuacgagggcaagcugaccgccgaggggcuccgcuucggcaucguggccagccgguucaaccacgcgcuggucgaccgccugguggagggggccaucgacgccaucgugcggcacggcgggcgcgaggaggacaucacccucguccgggugcccggcuccugggagaucccgguggccgccggcgagcuggcccgcaaggaggacaucgacgcggucaucgccaucggggugcugauccggggcgccacgccccacuucgacuacaucgccagcgagguguccaaggggcucgcggaccugagccuggagcuccgcaagcccaucaccuucggcgucaucaccgccgacacccuggagcaggccaucgagcgggccgggacgaagcacggcaacaagggcugggaggccgcgcuguccgccaucgagauggccaaccucuucaagagccugcgcggcgggagcggcggguccggcgggagcggcggcuccgggggcgggcuguuccaggaguaccagugcuacggcuccagcuccaacacccgggugcucaacgagcugaacuacgacaacgcggggaccaaccuguacaacgagcucgagaugaacuacuacggcaagcaggagaacugguacagccugaagaagaacucccgcagccugggggagaacgacgacggcaacaacgaggacaacgagaagcuccggaagcccaagcacaagaagcugaagcagccggccgacgggaaccccgaccccaacgccaaccccaacguggacccgaacgccaaccccaacgucgaccccaacgccaaccccaacguggacccgaacgcgaaccccaacgccaaccccaacgccaaccccaacgccaacccgaacgcgaaccccaacgccaaccccaacgccaaccccaacgccaacccgaacgccaaccccaacgcgaaccccaacgccaaccccaacgccaacccgaacgccaaccccaacgccaaccccaacgcgaaccccaacgccaacccgaacgccaaccccaacguggaccccaacgccaaccccaacgccaacccgaacgcgaaccccaacgccaaccccaacgccaacccgaacgccaaccccaacgccaaccccaacgcgaaccccaacgccaacccgaacgccaaccccaacgccaaccccaacgcgaaccccaacgccaacccgaacgccaaccccaacgccaaccccaacgccaaccccaacgcgaacccgaacgccaaccccaacaagaacaaccagggcaacggccaggggcacaacaugcccaacgaccccaaccgcaacgucgacgagaacgccaacgccaacuccgccgugaagaacaacaacaacgaggagccgagcgacaagcacaucaaggaguaccugaacaagauccagaacucccucagcacggaguggucccccugcagcgugaccugcggcaacgggauccagguccggaucaagcccggcuccgcgaacaagcccaaggacgagcuggacuacgccaacgacaucgagaagaagaucugcaagauggagaagugcagcuccguguucaacguggucaacagcuccaucgggcugaucauggugcucagcuuccuguuccugaacugaggacuaguuauaagacugacuagcccgaugggccucccaacgggcccuccuccccuccuugcaccgagauuaauaaaaaaaaaaaaaaaaaaaaaaaaaaaaaaaaaaaaaaaaaaaaaaaaaaaaaaaaaaaaaaaaugcaucccccccccccccccccccccccccccccccaaaggcucuuuucagagccaccagaauu

SEQ ID NO: 9061 - RNA, 1411 nt, Artificial Sequence
  mRNA Design i-3 (A64-N5-C30-hSL-N5) comprising derived and/or modified sequence from Pf(3D7)__XP_001351122.1__HsALB_Pf-CSP(19-397) (opt1)
aggagaaagcuuaccaugaagugggugaccuucaucagccuccuguuccuguucuccagcgccuacucccuguuccaggaguaccagugcuacggcuccagcuccaacacccgggugcucaacgagcugaacuacgacaacgcggggaccaaccuguacaacgagcucgagaugaacuacuacggcaagcaggagaacugguacagccugaagaagaacucccgcagccugggggagaacgacgacggcaacaacgaggacaacgagaagcuccggaagcccaagcacaagaagcugaagcagccggccgacgggaaccccgaccccaacgccaaccccaacguggacccgaacgccaaccccaacgucgaccccaacgccaaccccaacguggacccgaacgcgaaccccaacgccaaccccaacgccaaccccaacgccaacccgaacgcgaaccccaacgccaaccccaacgccaaccccaacgccaacccgaacgccaaccccaacgcgaaccccaacgccaaccccaacgccaacccgaacgccaaccccaacgccaaccccaacgcgaaccccaacgccaacccgaacgccaaccccaacguggaccccaacgccaaccccaacgccaacccgaacgcgaaccccaacgccaaccccaacgccaacccgaacgccaaccccaacgccaaccccaacgcgaaccccaacgccaacccgaacgccaaccccaacgccaaccccaacgcgaaccccaacgccaacccgaacgccaaccccaacgccaaccccaacgccaaccccaacgcgaacccgaacgccaaccccaacaagaacaaccagggcaacggccaggggcacaacaugcccaacgaccccaaccgcaacgucgacgagaacgccaacgccaacuccgccgugaagaacaacaacaacgaggagccgagcgacaagcacaucaaggaguaccugaacaagauccagaacucccucagcacggaguggucccccugcagcgugaccugcggcaacgggauccagguccggaucaagcccggcuccgcgaacaagcccaaggacgagcuggacuacgccaacgacaucgagaagaagaucugcaagauggagaagugcagcuccguguucaacguggucaacagcuccaucgggcugaucauggugcucagcuuccuguuccugaacugaggacuaguuauaagacugacuagcccgaugggccucccaacgggcccuccuccccuccuugcaccgagauuaauaaaaaaaaaaaaaaaaaaaaaaaaaaaaaaaaaaaaaaaaaaaaaaaaaaaaaaaaaaaaaaaaugcaucccccccccccccccccccccccccccccccaaaggcucuuuucagagccaccagaauu

SEQ ID NO: 9062 - RNA, 1726 nt, Artificial Sequence
  mRNA Design i-3 (A64-N5-C30-hSL-N5) comprising derived and/or modified sequence from Pf(3D7)__XP_001351122.1__HsALB_Pf-CSP(19-272)_L(PVTN)_HBsAg (opt1)
aggagaaagcuuaccaugaagugggugaccuucaucagccugcucuuccuguucuccagcgccuacucccuguuccaggaguaccagugcuacggcuccagcuccaacacccgggugcucaacgagcugaacuacgacaacgcggggaccaaccuguacaacgagcucgagaugaacuacuacggcaagcaggagaacugguacagccugaagaagaacucccgcagccugggggagaacgacgacggcaacaacgaggacaacgagaagcuccggaagcccaagcacaagaagcugaagcagccggccgacgggaaccccgaccccaacgccaaccccaacguggacccgaacgccaaccccaacgucgaccccaacgccaaccccaacguggacccgaacgcgaaccccaacgccaaccccaacgccaaccccaacgccaacccgaacgcgaaccccaacgccaaccccaacgccaaccccaacgccaacccgaacgccaaccccaacgcgaaccccaacgccaaccccaacgccaacccgaacgccaaccccaacgccaaccccaacgcgaaccccaacgccaacccgaacgccaaccccaacguggaccccaacgccaaccccaacgccaacccgaacgcgaaccccaacgccaaccccaacgccaacccgaacgccaaccccaacgccaaccccaacgcgaaccccaacgccaacccgaacgccaaccccaacgccaaccccaacgcgaaccccaacgccaacccgaacgccaaccccaacgccaaccccaacgccaaccccaacgcgaacccgaacgccaaccccccggugacgaacauggagaacaucaccagcggcuuccuggggccccuccuggugcugcaggccggcuucuuccuccugacccgcauccugaccaucccgcagucccucgacagcugguggaccucccugaacuuccucgggggcagccccgucugccuggggcagaacucccagagccccaccuccaaccacagccccaccuccugcccgcccaucugccccggcuaccgguggaugugccugcgccgguucaucaucuuccuguucauccuccugcugugccucaucuuccugcuggugcuccuggacuaccagggcaugcugcccgugugcccgcucauccccgggagcacgaccaccaacaccggccccugcaagacgugcaccacccccgcccaggggaacuccauguucccgagcugcugcugcaccaagcccacggacggcaacugcacgugcauccccauccccuccagcugggcguucgccaaguaccugugggagugggccuccguccgcuucagcuggcugucccuccuggugccguucgugcagugguucgucgggcugagccccaccguguggcucuccgccaucuggaugaugugguacuggggccccagccuguacagcaucgugucccccuucaucccgcugcuccccaucuucuucugccugugggucuacaucugaggacuaguuauaagacugacuagcccgaugggccucccaacgggcccuccuccccuccuugcaccgagauuaauaaaaaaaaaaaaaaaaaaaaaaaaaaaaaaaaaaaaaaaaaaaaaaaaaaaaaaaaaaaaaaaaugcaucccccccccccccccccccccccccccccccaaaggcucuuuucagagccaccagaauu

SEQ ID NO: 9063 - RNA, 1843 nt, Artificial Sequence
  mRNA Design i-3 (A64-N5-C30-hSL-N5) comprising derived and/or modified sequence from Pf(3D7)__XP_001351122.1__HsALB_Pf-CSP(19-272)_L(AAY)_Pf-CSP(346-3 65)_L(AAY)_PADRE_L(PVTN)_HBsAg (opt1)
aggagaaagcuuaccaugaagugggugaccuucaucagccugcucuuccuguucuccagcgccuacucccuguuccaggaguaccagugcuacggcuccagcuccaacacccgggugcucaacgagcugaacuacgacaacgcggggaccaaccuguacaacgagcucgagaugaacuacuacggcaagcaggagaacugguacagccugaagaagaacucccgcagccugggggagaacgacgacggcaacaacgaggacaacgagaagcuccggaagcccaagcacaagaagcugaagcagccggccgacgggaaccccgaccccaacgccaaccccaacguggacccgaacgccaaccccaacgucgaccccaacgccaaccccaacguggacccgaacgcgaaccccaacgccaaccccaacgccaaccccaacgccaacccgaacgcgaaccccaacgccaaccccaacgccaaccccaacgccaacccgaacgccaaccccaacgcgaaccccaacgccaaccccaacgccaacccgaacgccaaccccaacgccaaccccaacgcgaaccccaacgccaacccgaacgccaaccccaacguggaccccaacgccaaccccaacgccaacccgaacgcgaaccccaacgccaaccccaacgccaacccgaacgccaaccccaacgccaaccccaacgcgaaccccaacgccaacccgaacgccaaccccaacgccaaccccaacgcgaaccccaacgccaacccgaacgccaaccccaacgccaaccccaacgccaaccccaacgcgaacccgaacgccaaccccgccgcguauaucaagcccggcuccgcgaacaagcccaaggacgagcuggacuacgccaacgacaucgaggcggccuacgccaaguucguggccgccuggacccugaaggcggccgccccggugacgaacauggagaacaucaccagcggcuuccuggggccccuccuggugcugcaggccggcuucuuccuccugacccgcauccugaccaucccgcagucccucgacagcugguggaccucccugaacuuccucgggggcagccccgucugccuggggcagaacucccagagccccaccuccaaccacagccccaccuccugcccgcccaucugccccggcuaccgguggaugugccugcgccgguucaucaucuuccuguucauccuccugcugugccucaucuuccugcuggugcuccuggacuaccagggcaugcugcccgugugcccgcucauccccgggagcacgaccaccaacaccggccccugcaagacgugcaccacccccgcccaggggaacuccauguucccgagcugcugcugcaccaagcccacggacggcaacugcacgugcauccccauccccuccagcugggcguucgccaaguaccugugggagugggccuccguccgcuucagcuggcugucccuccuggugccguucgugcagugguucgucgggcugagccccaccguguggcucuccgccaucuggaugaugugguacuggggccccagccuguacagcaucgugucccccuucaucccgcugcuccccaucuucuucugccugugggucuacaucugaggacuaguuauaagacugacuagcccgaugggccucccaacgggcccuccuccccuccuugcaccgagauuaauaaaaaaaaaaaaaaaaaaaaaaaaaaaaaaaaaaaaaaaaaaaaaaaaaaaaaaaaaaaaaaaaugcaucccccccccccccccccccccccccccccccaaaggcucuuuucagagccaccagaauu

SEQ ID NO: 9064 - RNA, 1843 nt, Artificial Sequence
  mRNA Design i-3 (A64-N5-C30-hSL-N5) comprising derived and/or modified sequence from Pf(3D7)__XP_001351122.1__HsALB_Pf-CSP(19-272)_L(AAY)_Pf-CSP(346-3 65)_L(AAY)_PADRE_L(PVTN)_HBsAg (opt1)
aggagaaagcuuaccaugaagugggugaccuucaucagccuccuguuccuguucuccagcgccuacucccuguuccaggaguaccagugcuacggcuccagcuccaacacccgggugcucaacgagcugaacuacgacaacgcggggaccaaccuguacaacgagcucgagaugaacuacuacggcaagcaggagaacugguacagccugaagaagaacucccgcagccugggggagaacgacgacggcaacaacgaggacaacgagaagcuccggaagcccaagcacaagaagcugaagcagccggccgacgggaaccccgaccccaacgccaaccccaacguggacccgaacgccaaccccaacgucgaccccaacgccaaccccaacguggacccgaacgcgaaccccaacgccaaccccaacgccaaccccaacgccaacccgaacgcgaaccccaacgccaaccccaacgccaaccccaacgccaacccgaacgccaaccccaacgcgaaccccaacgccaaccccaacgccaacccgaacgccaaccccaacgccaaccccaacgcgaaccccaacgccaacccgaacgccaaccccaacguggaccccaacgccaaccccaacgccaacccgaacgcgaaccccaacgccaaccccaacgccaacccgaacgccaaccccaacgccaaccccaacgcgaaccccaacgccaacccgaacgccaaccccaacgccaaccccaacgcgaaccccaacgccaacccgaacgccaaccccaacgccaaccccaacgccaaccccaacgcgaacccgaacgccaaccccgccgcguauaucaagcccggcuccgcgaacaagcccaaggacgagcuggacuacgccaacgacaucgaggcggccuacgccaaguucguggccgccuggacccugaaggcggccgccccggugacgaacauggagaacaucaccagcggcuuccuggggccccuccuggugcugcaggccggcuucuuccuccugacccgcauccugaccaucccgcagucccucgacagcugguggaccucccugaacuuccucgggggcagccccgucugccuggggcagaacucccagagccccaccuccaaccacagccccaccuccugcccgcccaucugccccggcuaccgguggaugugccugcgccgguucaucaucuuccuguucauccuccugcugugccucaucuuccugcuggugcuccuggacuaccagggcaugcugcccgugugcccgcucauccccgggagcacgaccaccaacaccggccccugcaagacgugcaccacccccgcccaggggaacuccauguucccgagcugcugcugcaccaagcccacggacggcaacugcacgugcauccccauccccuccagcugggcguucgccaaguaccugugggagugggccuccguccgcuucagcuggcugucccuccuggugccguucgugcagugguucgucgggcugagccccaccguguggcucuccgccaucuggaugaugugguacuggggccccagccuguacagcaucgugucccccuucaucccgcugcuccccaucuucuucugccugugggucuacaucugaggacuaguuauaagacugacuagcccgaugggccucccaacgggcccuccuccccuccuugcaccgagauuaauaaaaaaaaaaaaaaaaaaaaaaaaaaaaaaaaaaaaaaaaaaaaaaaaaaaaaaaaaaaaaaaaugcaucccccccccccccccccccccccccccccccaaaggcucuuuucagagccaccagaauu

SEQ ID NO: 9065 - RNA, 2062 nt, Artificial Sequence
  mRNA Design i-3 (A64-N5-C30-hSL-N5) comprising derived and/or modified sequence from Pf(3D7)__XP_001351122.1__HsALB_Pf-CSP(19-384)_L(PVTN)_HBsAg (opt1)
aggagaaagcuuaccaugaagugggugaccuucaucagccugcucuuccuguucuccagcgccuacucccuguuccaggaguaccagugcuacggcuccagcuccaacacccgggugcucaacgagcugaacuacgacaacgcggggaccaaccuguacaacgagcucgagaugaacuacuacggcaagcaggagaacugguacagccugaagaagaacucccgcagccugggggagaacgacgacggcaacaacgaggacaacgagaagcuccggaagcccaagcacaagaagcugaagcagccggccgacgggaaccccgaccccaacgccaaccccaacguggacccgaacgccaaccccaacgucgaccccaacgccaaccccaacguggacccgaacgcgaaccccaacgccaaccccaacgccaaccccaacgccaacccgaacgcgaaccccaacgccaaccccaacgccaaccccaacgccaacccgaacgccaaccccaacgcgaaccccaacgccaaccccaacgccaacccgaacgccaaccccaacgccaaccccaacgcgaaccccaacgccaacccgaacgccaaccccaacguggaccccaacgccaaccccaacgccaacccgaacgcgaaccccaacgccaaccccaacgccaacccgaacgccaaccccaacgccaaccccaacgcgaaccccaacgccaacccgaacgccaaccccaacgccaaccccaacgcgaaccccaacgccaacccgaacgccaaccccaacgccaaccccaacgccaaccccaacgcgaacccgaacgccaaccccaacaagaacaaccagggcaacggccaggggcacaacaugcccaacgaccccaaccgcaacgucgacgagaacgccaacgccaacuccgccgugaagaacaacaacaacgaggagccgagcgacaagcacaucaaggaguaccugaacaagauccagaacucccucagcacggaguggucccccugcagcgugaccugcggcaacgggauccagguccggaucaagcccggcuccgcgaacaagcccaaggacgagcuggacuacgccaacgacaucgagaagaagaucugcaagauggagaagugcagcuccguguucaacguggucaacagcuccccggugacgaacauggagaacaucaccagcggcuuccuggggccccuccuggugcugcaggccggcuucuuccuccugacccgcauccugaccaucccgcagucccucgacagcugguggaccucccugaacuuccucgggggcagccccgucugccuggggcagaacucccagagccccaccuccaaccacagccccaccuccugcccgcccaucugccccggcuaccgguggaugugccugcgccgguucaucaucuuccuguucauccuccugcugugccucaucuuccugcuggugcuccuggacuaccagggcaugcugcccgugugcccgcucauccccgggagcacgaccaccaacaccggccccugcaagacgugcaccacccccgcccaggggaacuccauguucccgagcugcugcugcaccaagcccacggacggcaacugcacgugcauccccauccccuccagcugggcguucgccaaguaccugugggagugggccuccguccgcuucagcuggcugucccuccuggugccguucgugcagugguucgucgggcugagccccaccguguggcucuccgccaucuggaugaugugguacuggggccccagccuguacagcaucgugucccccuucaucccgcugcuccccaucuucuucugccugugggucuacaucugaggacuaguuauaagacugacuagcccgaugggccucccaacgggcccuccuccccuccuugcaccgagauuaauaaaaaaaaaaaaaaaaaaaaaaaaaaaaaaaaaaaaaaaaaaaaaaaaaaaaaaaaaaaaaaaaugcaucccccccccccccccccccccccccccccccaaaggcucuuuucagagccaccagaauu

SEQ ID NO: 9066 - RNA, 2062 nt, Artificial Sequence
  mRNA Design i-3 (A64-N5-C30-hSL-N5) comprising derived and/or modified sequence from Pf(3D7)__XP_001351122.1__HsALB_Pf-CSP(19-384)_L(PVTN)_HBsAg (opt1)
aggagaaagcuuaccaugaagugggugaccuucaucagccuccuguuccuguucuccagcgccuacucccuguuccaggaguaccagugcuacggcuccagcuccaacacccgggugcucaacgagcugaacuacgacaacgcggggaccaaccuguacaacgagcucgagaugaacuacuacggcaagcaggagaacugguacagccugaagaagaacucccgcagccugggggagaacgacgacggcaacaacgaggacaacgagaagcuccggaagcccaagcacaagaagcugaagcagccggccgacgggaaccccgaccccaacgccaaccccaacguggacccgaacgccaaccccaacgucgaccccaacgccaaccccaacguggacccgaacgcgaaccccaacgccaaccccaacgccaaccccaacgccaacccgaacgcgaaccccaacgccaaccccaacgccaaccccaacgccaacccgaacgccaaccccaacgcgaaccccaacgccaaccccaacgccaacccgaacgccaaccccaacgccaaccccaacgcgaaccccaacgccaacccgaacgccaaccccaacguggaccccaacgccaaccccaacgccaacccgaacgcgaaccccaacgccaaccccaacgccaacccgaacgccaaccccaacgccaaccccaacgcgaaccccaacgccaacccgaacgccaaccccaacgccaaccccaacgcgaaccccaacgccaacccgaacgccaaccccaacgccaaccccaacgccaaccccaacgcgaacccgaacgccaaccccaacaagaacaaccagggcaacggccaggggcacaacaugcccaacgaccccaaccgcaacgucgacgagaacgccaacgccaacuccgccgugaagaacaacaacaacgaggagccgagcgacaagcacaucaaggaguaccugaacaagauccagaacucccucagcacggaguggucccccugcagcgugaccugcggcaacgggauccagguccggaucaagcccggcuccgcgaacaagcccaaggacgagcuggacuacgccaacgacaucgagaagaagaucugcaagauggagaagugcagcuccguguucaacguggucaacagcuccccggugacgaacauggagaacaucaccagcggcuuccuggggccccuccuggugcugcaggccggcuucuuccuccugacccgcauccugaccaucccgcagucccucgacagcugguggaccucccugaacuuccucgggggcagccccgucugccuggggcagaacucccagagccccaccuccaaccacagccccaccuccugcccgcccaucugccccggcuaccgguggaugugccugcgccgguucaucaucuuccuguucauccuccugcugugccucaucuuccugcuggugcuccuggacuaccagggcaugcugcccgugugcccgcucauccccgggagcacgaccaccaacaccggccccugcaagacgugcaccacccccgcccaggggaacuccauguucccgagcugcugcugcaccaagcccacggacggcaacugcacgugcauccccauccccuccagcugggcguucgccaaguaccugugggagugggccuccguccgcuucagcuggcugucccuccuggugccguucgugcagugguucgucgggcugagccccaccguguggcucuccgccaucuggaugaugugguacuggggccccagccuguacagcaucgugucccccuucaucccgcugcuccccaucuucuucugccugugggucuacaucugaggacuaguuauaagacugacuagcccgaugggccucccaacgggcccuccuccccuccuugcaccgagauuaauaaaaaaaaaaaaaaaaaaaaaaaaaaaaaaaaaaaaaaaaaaaaaaaaaaaaaaaaaaaaaaaaugcaucccccccccccccccccccccccccccccccaaaggcucuuuucagagccaccagaauu

SEQ ID NO: 9067 - RNA, 1879 nt, Artificial Sequence
  mRNA Design i-3 (A64-N5-C30-hSL-N5) comprising derived and/or modified sequence from Pf(3D7)__XP_001351122.1__HsALB_Pf-CSP(19-384)_L(SGG)_Ferritin (opt1)
aggagaaagcuuaccaugaagugggugaccuucaucagccugcucuuccuguucuccagcgccuacucccuguuccaggaguaccagugcuacggcuccagcuccaacacccgggugcucaacgagcugaacuacgacaacgcggggaccaaccuguacaacgagcucgagaugaacuacuacggcaagcaggagaacugguacagccugaagaagaacucccgcagccugggggagaacgacgacggcaacaacgaggacaacgagaagcuccggaagcccaagcacaagaagcugaagcagccggccgacgggaaccccgaccccaacgccaaccccaacguggacccgaacgccaaccccaacgucgaccccaacgccaaccccaacguggacccgaacgcgaaccccaacgccaaccccaacgccaaccccaacgccaacccgaacgcgaaccccaacgccaaccccaacgccaaccccaacgccaacccgaacgccaaccccaacgcgaaccccaacgccaaccccaacgccaacccgaacgccaaccccaacgccaaccccaacgcgaaccccaacgccaacccgaacgccaaccccaacguggaccccaacgccaaccccaacgccaacccgaacgcgaaccccaacgccaaccccaacgccaacccgaacgccaaccccaacgccaaccccaacgcgaaccccaacgccaacccgaacgccaaccccaacgccaaccccaacgcgaaccccaacgccaacccgaacgccaaccccaacgccaaccccaacgccaaccccaacgcgaacccgaacgccaaccccaacaagaacaaccagggcaacggccaggggcacaacaugcccaacgaccccaaccgcaacgucgacgagaacgccaacgccaacuccgccgugaagaacaacaacaacgaggagccgagcgacaagcacaucaaggaguaccugaacaagauccagaacucccucagcacggaguggucccccugcagcgugaccugcggcaacgggauccagguccggaucaagcccggcuccgcgaacaagcccaaggacgagcuggacuacgccaacgacaucgagaagaagaucugcaagauggagaagugcagcuccguguucaacguggucaacagcuccagcggcgggcugagcaaggacaucaucaagcuccugaacgagcaggugaacaaggagaugaacuccagcaaccuguacauguccaugagcuccuggugcuacacccacagccucgacggcgccgggcuguuccuguucgaccacgccgcggaggaguacgagcacgccaagaagcucaucaucuuccugaacgagaacaacguccccgugcagcugaccuccaucagcgccccggagcacaaguucgagggccucacgcagaucuuccagaaggccuacgagcacgagcagcacaucuccgagagcaucaacaacaucguggaccacgccaucaaguccaaggaccacgcgaccuucaacuuccugcagugguacgucgccgagcagcacgaggaggaggugcuguucaaggacauccucgacaagaucgagcugaucgggaacgagaaccacggccuguaccucgccgaccaguacgugaaggggaucgccaagagccgcaaguccugaggacuaguuauaagacugacuagcccgaugggccucccaacgggcccuccuccccuccuugcaccgagauuaauaaaaaaaaaaaaaaaaaaaaaaaaaaaaaaaaaaaaaaaaaaaaaaaaaaaaaaaaaaaaaaaaugcaucccccccccccccccccccccccccccccccaaaggcucuuuucagagccaccagaauu

SEQ ID NO: 9068 - RNA, 1879 nt, Artificial Sequence
  mRNA Design i-3 (A64-N5-C30-hSL-N5) comprising derived and/or modified sequence from Pf(3D7)__XP_001351122.1__HsALB_Pf-CSP(19-384)_L(SGG)_Ferritin (opt1)
aggagaaagcuuaccaugaagugggugaccuucaucagccuccuguuccuguucuccagcgccuacucccuguuccaggaguaccagugcuacggcuccagcuccaacacccgggugcucaacgagcugaacuacgacaacgcggggaccaaccuguacaacgagcucgagaugaacuacuacggcaagcaggagaacugguacagccugaagaagaacucccgcagccugggggagaacgacgacggcaacaacgaggacaacgagaagcuccggaagcccaagcacaagaagcugaagcagccggccgacgggaaccccgaccccaacgccaaccccaacguggacccgaacgccaaccccaacgucgaccccaacgccaaccccaacguggacccgaacgcgaaccccaacgccaaccccaacgccaaccccaacgccaacccgaacgcgaaccccaacgccaaccccaacgccaaccccaacgccaacccgaacgccaaccccaacgcgaaccccaacgccaaccccaacgccaacccgaacgccaaccccaacgccaaccccaacgcgaaccccaacgccaacccgaacgccaaccccaacguggaccccaacgccaaccccaacgccaacccgaacgcgaaccccaacgccaaccccaacgccaacccgaacgccaaccccaacgccaaccccaacgcgaaccccaacgccaacccgaacgccaaccccaacgccaaccccaacgcgaaccccaacgccaacccgaacgccaaccccaacgccaaccccaacgccaaccccaacgcgaacccgaacgccaaccccaacaagaacaaccagggcaacggccaggggcacaacaugcccaacgaccccaaccgcaacgucgacgagaacgccaacgccaacuccgccgugaagaacaacaacaacgaggagccgagcgacaagcacaucaaggaguaccugaacaagauccagaacucccucagcacggaguggucccccugcagcgugaccugcggcaacgggauccagguccggaucaagcccggcuccgcgaacaagcccaaggacgagcuggacuacgccaacgacaucgagaagaagaucugcaagauggagaagugcagcuccguguucaacguggucaacagcuccagcggcgggcugagcaaggacaucaucaagcuccugaacgagcaggugaacaaggagaugaacuccagcaaccuguacauguccaugagcuccuggugcuacacccacagccucgacggcgccgggcuguuccuguucgaccacgccgcggaggaguacgagcacgccaagaagcucaucaucuuccugaacgagaacaacguccccgugcagcugaccuccaucagcgccccggagcacaaguucgagggccucacgcagaucuuccagaaggccuacgagcacgagcagcacaucuccgagagcaucaacaacaucguggaccacgccaucaaguccaaggaccacgcgaccuucaacuuccugcagugguacgucgccgagcagcacgaggaggaggugcuguucaaggacauccucgacaagaucgagcugaucgggaacgagaaccacggccuguaccucgccgaccaguacgugaaggggaucgccaagagccgcaaguccugaggacuaguuauaagacugacuagcccgaugggccucccaacgggcccuccuccccuccuugcaccgagauuaauaaaaaaaaaaaaaaaaaaaaaaaaaaaaaaaaaaaaaaaaaaaaaaaaaaaaaaaaaaaaaaaaugcaucccccccccccccccccccccccccccccccaaaggcucuuuucagagccaccagaauu

SEQ ID NO: 9069 - RNA, 1840 nt, Artificial Sequence
  mRNA Design i-3 (A64-N5-C30-hSL-N5) comprising derived and/or modified sequence from Pf(3D7)__XP_001351122.1__HsALB_Pf-CSP(93-384)_L(PVTN)_HBsAg (opt1)
aggagaaagcuuaccaugaagugggugaccuucaucagccugcucuuccuguucuccagcgccuacuccaagcugaagcagccggccgacgggaaccccgaccccaacgccaaccccaacguggacccgaacgccaaccccaacgucgaccccaacgccaaccccaacguggacccgaacgcgaaccccaacgccaaccccaacgccaaccccaacgccaacccgaacgcgaaccccaacgccaaccccaacgccaaccccaacgccaacccgaacgccaaccccaacgcgaaccccaacgccaaccccaacgccaacccgaacgccaaccccaacgccaaccccaacgcgaaccccaacgccaacccgaacgccaaccccaacguggaccccaacgccaaccccaacgccaacccgaacgcgaaccccaacgccaaccccaacgccaacccgaacgccaaccccaacgccaaccccaacgcgaaccccaacgccaacccgaacgccaaccccaacgccaaccccaacgcgaaccccaacgccaacccgaacgccaaccccaacgccaaccccaacgccaaccccaacgcgaacccgaacgccaaccccaacaagaacaaccagggcaacggccaggggcacaacaugcccaacgaccccaaccgcaacgucgacgagaacgccaacgccaacuccgccgugaagaacaacaacaacgaggagccgagcgacaagcacaucaaggaguaccugaacaagauccagaacucccucagcacggaguggucccccugcagcgugaccugcggcaacgggauccagguccggaucaagcccggcuccgcgaacaagcccaaggacgagcuggacuacgccaacgacaucgagaagaagaucugcaagauggagaagugcagcuccguguucaacguggucaacagcuccccggugacgaacauggagaacaucaccagcggcuuccuggggccccuccuggugcugcaggccggcuucuuccuccugacccgcauccugaccaucccgcagucccucgacagcugguggaccucccugaacuuccucgggggcagccccgucugccuggggcagaacucccagagccccaccuccaaccacagccccaccuccugcccgcccaucugccccggcuaccgguggaugugccugcgccgguucaucaucuuccuguucauccuccugcugugccucaucuuccugcuggugcuccuggacuaccagggcaugcugcccgugugcccgcucauccccgggagcacgaccaccaacaccggccccugcaagacgugcaccacccccgcccaggggaacuccauguucccgagcugcugcugcaccaagcccacggacggcaacugcacgugcauccccauccccuccagcugggcguucgccaaguaccugugggagugggccuccguccgcuucagcuggcugucccuccuggugccguucgugcagugguucgucgggcugagccccaccguguggcucuccgccaucuggaugaugugguacuggggccccagccuguacagcaucgugucccccuucaucccgcugcuccccaucuucuucugccugugggucuacaucugaggacuaguuauaagacugacuagcccgaugggccucccaacgggcccuccuccccuccuugcaccgagauuaauaaaaaaaaaaaaaaaaaaaaaaaaaaaaaaaaaaaaaaaaaaaaaaaaaaaaaaaaaaaaaaaaugcaucccccccccccccccccccccccccccccccaaaggcucuuuucagagccaccagaauu

SEQ ID NO: 9070 - RNA, 1840 nt, Artificial Sequence
  mRNA Design i-3 (A64-N5-C30-hSL-N5) comprising derived and/or modified sequence from Pf(3D7)__XP_001351122.1__HsALB_Pf-CSP(93-384)_L(PVTN)_HBsAg (opt1)
aggagaaagcuuaccaugaagugggugaccuucaucagccuccuguuccuguucuccagcgccuacuccaagcugaagcagccggccgacgggaaccccgaccccaacgccaaccccaacguggacccgaacgccaaccccaacgucgaccccaacgccaaccccaacguggacccgaacgcgaaccccaacgccaaccccaacgccaaccccaacgccaacccgaacgcgaaccccaacgccaaccccaacgccaaccccaacgccaacccgaacgccaaccccaacgcgaaccccaacgccaaccccaacgccaacccgaacgccaaccccaacgccaaccccaacgcgaaccccaacgccaacccgaacgccaaccccaacguggaccccaacgccaaccccaacgccaacccgaacgcgaaccccaacgccaaccccaacgccaacccgaacgccaaccccaacgccaaccccaacgcgaaccccaacgccaacccgaacgccaaccccaacgccaaccccaacgcgaaccccaacgccaacccgaacgccaaccccaacgccaaccccaacgccaaccccaacgcgaacccgaacgccaaccccaacaagaacaaccagggcaacggccaggggcacaacaugcccaacgaccccaaccgcaacgucgacgagaacgccaacgccaacuccgccgugaagaacaacaacaacgaggagccgagcgacaagcacaucaaggaguaccugaacaagauccagaacucccucagcacggaguggucccccugcagcgugaccugcggcaacgggauccagguccggaucaagcccggcuccgcgaacaagcccaaggacgagcuggacuacgccaacgacaucgagaagaagaucugcaagauggagaagugcagcuccguguucaacguggucaacagcuccccggugacgaacauggagaacaucaccagcggcuuccuggggccccuccuggugcugcaggccggcuucuuccuccugacccgcauccugaccaucccgcagucccucgacagcugguggaccucccugaacuuccucgggggcagccccgucugccuggggcagaacucccagagccccaccuccaaccacagccccaccuccugcccgcccaucugccccggcuaccgguggaugugccugcgccgguucaucaucuuccuguucauccuccugcugugccucaucuuccugcuggugcuccuggacuaccagggcaugcugcccgugugcccgcucauccccgggagcacgaccaccaacaccggccccugcaagacgugcaccacccccgcccaggggaacuccauguucccgagcugcugcugcaccaagcccacggacggcaacugcacgugcauccccauccccuccagcugggcguucgccaaguaccugugggagugggccuccguccgcuucagcuggcugucccuccuggugccguucgugcagugguucgucgggcugagccccaccguguggcucuccgccaucuggaugaugugguacuggggccccagccuguacagcaucgugucccccuucaucccgcugcuccccaucuucuucugccugugggucuacaucugaggacuaguuauaagacugacuagcccgaugggccucccaacgggcccuccuccccuccuugcaccgagauuaauaaaaaaaaaaaaaaaaaaaaaaaaaaaaaaaaaaaaaaaaaaaaaaaaaaaaaaaaaaaaaaaaugcaucccccccccccccccccccccccccccccccaaaggcucuuuucagagccaccagaauu

SEQ ID NO: 9071 - RNA, 1501 nt, Artificial Sequence; identical to SEQ ID NO: 1822
  mRNA Design i-3 (A64-N5-C30-hSL-N5) comprising derived and/or modified sequence from Pf(3D7)__XP_001351122.1__HsALB_Pf-CSP(199-377)_L(PVTN)_HBsAg (opt1)

SEQ ID NO: 9072 - RNA, 1198 nt, Artificial Sequence
  mRNA Design i-3 (A64-N5-C30-hSL-N5) comprising derived and/or modified sequence from Pf(3D7)__XP_001351122.1__HsALB_Pf-CSP(19-272)_L(AAY)_Pf-CSP(310-3 27)_L(AAY)_Pf-CSP(346-375) (opt1)
aggagaaagcuuaccaugaagugggugaccuucaucagccuccuguuccuguucuccagcgccuacucccuguuccaggaguaccagugcuacggcuccagcuccaacacccgggugcucaacgagcugaacuacgacaacgcggggaccaaccuguacaacgagcucgagaugaacuacuacggcaagcaggagaacugguacagccugaagaagaacucccgcagccugggggagaacgacgacggcaacaacgaggacaacgagaagcuccggaagcccaagcacaagaagcugaagcagccggccgacgggaaccccgaccccaacgccaaccccaacguggacccgaacgccaaccccaacgucgaccccaacgccaaccccaacguggacccgaacgcgaaccccaacgccaaccccaacgccaaccccaacgccaacccgaacgcgaaccccaacgccaaccccaacgccaaccccaacgccaacccgaacgccaaccccaacgcgaaccccaacgccaaccccaacgccaacccgaacgccaaccccaacgccaaccccaacgcgaaccccaacgccaacccgaacgccaaccccaacguggaccccaacgccaaccccaacgccaacccgaacgcgaaccccaacgccaaccccaacgccaacccgaacgccaaccccaacgccaaccccaacgcgaaccccaacgccaacccgaacgccaaccccaacgccaaccccaacgcgaaccccaacgccaacccgaacgccaaccccaacgccaaccccaacgccaaccccaacgcgaacccgaacgccaaccccgccgcguaugagccgagcgacaagcacaucaaggaguaccugaacaagauccagaacucccucgcggccuacaucaagcccggcuccgcgaacaagcccaaggacgagcuggacuacgccaacgacaucgagaagaagaucugcaagauggagaagugcagcugaggacuaguuauaagacugacuagcccgaugggccucccaacgggcccuccuccccuccuugcaccgagauuaauaaaaaaaaaaaaaaaaaaaaaaaaaaaaaaaaaaaaaaaaaaaaaaaaaaaaaaaaaaaaaaaaugcaucccccccccccccccccccccccccccccccaaaggcucuuuucagagccaccagaauu

SEQ ID NO: 9073 - RNA, 1198 nt, Artificial Sequence
  mRNA Design i-3 (A64-N5-C30-hSL-N5) comprising derived and/or modified sequence from Pf(3D7)__XP_001351122.1__HsALB_Pf-CSP(19-272)_L(AAY)_Pf-CSP(346-3 75)_L(AAY)_Pf-CSP(310-327) (opt1)
aggagaaagcuuaccaugaagugggugaccuucaucagccuccuguuccuguucuccagcgccuacucccuguuccaggaguaccagugcuacggcuccagcuccaacacccgggugcucaacgagcugaacuacgacaacgcggggaccaaccuguacaacgagcucgagaugaacuacuacggcaagcaggagaacugguacagccugaagaagaacucccgcagccugggggagaacgacgacggcaacaacgaggacaacgagaagcuccggaagcccaagcacaagaagcugaagcagccggccgacgggaaccccgaccccaacgccaaccccaacguggacccgaacgccaaccccaacgucgaccccaacgccaaccccaacguggacccgaacgcgaaccccaacgccaaccccaacgccaaccccaacgccaacccgaacgcgaaccccaacgccaaccccaacgccaaccccaacgccaacccgaacgccaaccccaacgcgaaccccaacgccaaccccaacgccaacccgaacgccaaccccaacgccaaccccaacgcgaaccccaacgccaacccgaacgccaaccccaacguggaccccaacgccaaccccaacgccaacccgaacgcgaaccccaacgccaaccccaacgccaacccgaacgccaaccccaacgccaaccccaacgcgaaccccaacgccaacccgaacgccaaccccaacgccaaccccaacgcgaaccccaacgccaacccgaacgccaaccccaacgccaaccccaacgccaaccccaacgcgaacccgaacgccaaccccgcggccuacaucaagcccggcuccgcgaacaagcccaaggacgagcuggacuacgccaacgacaucgagaagaagaucugcaagauggagaagugcagcgccgcguaugagccgagcgacaagcacaucaaggaguaccugaacaagauccagaacucccucugaggacuaguuauaagacugacuagcccgaugggccucccaacgggcccuccuccccuccuugcaccgagauuaauaaaaaaaaaaaaaaaaaaaaaaaaaaaaaaaaaaaaaaaaaaaaaaaaaaaaaaaaaaaaaaaaugcaucccccccccccccccccccccccccccccccaaaggcucuuuucagagccaccagaauu

SEQ ID NO: 9074 - RNA, 1246 nt, Artificial Sequence
  mRNA Design i-3 (A64-N5-C30-hSL-N5) comprising derived and/or modified sequence from Pf(3D7)__XP_001351122.1__HsALB_Pf-CSP(19-272)_L(AAY)_Pf-CSP(346-3 75)_L(AAY)_Pf-CSP(310-327)_L(AAY)_PADRE (opt1)
aggagaaagcuuaccaugaagugggugaccuucaucagccuccuguuccuguucuccagcgccuacucccuguuccaggaguaccagugcuacggcuccagcuccaacacccgggugcucaacgagcugaacuacgacaacgcggggaccaaccuguacaacgagcucgagaugaacuacuacggcaagcaggagaacugguacagccugaagaagaacucccgcagccugggggagaacgacgacggcaacaacgaggacaacgagaagcuccggaagcccaagcacaagaagcugaagcagccggccgacgggaaccccgaccccaacgccaaccccaacguggacccgaacgccaaccccaacgucgaccccaacgccaaccccaacguggacccgaacgcgaaccccaacgccaaccccaacgccaaccccaacgccaacccgaacgcgaaccccaacgccaaccccaacgccaaccccaacgccaacccgaacgccaaccccaacgcgaaccccaacgccaaccccaacgccaacccgaacgccaaccccaacgccaaccccaacgcgaaccccaacgccaacccgaacgccaaccccaacguggaccccaacgccaaccccaacgccaacccgaacgcgaaccccaacgccaaccccaacgccaacccgaacgccaaccccaacgccaaccccaacgcgaaccccaacgccaacccgaacgccaaccccaacgccaaccccaacgcgaaccccaacgccaacccgaacgccaaccccaacgccaaccccaacgccaaccccaacgcgaacccgaacgccaaccccgccgcguauaucaagcccggcuccgcgaacaagcccaaggacgagcuggacuacgccaacgacaucgagaagaagaucugcaagauggagaagugcagcgcggccuacgagccgagcgacaagcacaucaaggaguaccugaacaagauccagaacucccucgccgccuacgccaaguucguggccgccuggacccugaaggcggccgccugaggacuaguuauaagacugacuagcccgaugggccucccaacgggcccuccuccccuccuugcaccgagauuaauaaaaaaaaaaaaaaaaaaaaaaaaaaaaaaaaaaaaaaaaaaaaaaaaaaaaaaaaaaaaaaaaugcaucccccccccccccccccccccccccccccccaaaggcucuuuucagagccaccagaauu

SEQ ID NO: 9075 - RNA, 1246 nt, Artificial Sequence
  mRNA Design i-3 (A64-N5-C30-hSL-N5) comprising derived and/or modified sequence from Pf(3D7)__XP_001351122.1__HsALB_Pf-CSP(19-272)_L(AAY)_Pf-CSP(310-3 27)_L(AAY)_Pf-CSP(346-375)_L(AAY)_PADRE (opt1)
aggagaaagcuuaccaugaagugggugaccuucaucagccuccuguuccuguucuccagcgccuacucccuguuccaggaguaccagugcuacggcuccagcuccaacacccgggugcucaacgagcugaacuacgacaacgcggggaccaaccuguacaacgagcucgagaugaacuacuacggcaagcaggagaacugguacagccugaagaagaacucccgcagccugggggagaacgacgacggcaacaacgaggacaacgagaagcuccggaagcccaagcacaagaagcugaagcagccggccgacgggaaccccgaccccaacgccaaccccaacguggacccgaacgccaaccccaacgucgaccccaacgccaaccccaacguggacccgaacgcgaaccccaacgccaaccccaacgccaaccccaacgccaacccgaacgcgaaccccaacgccaaccccaacgccaaccccaacgccaacccgaacgccaaccccaacgcgaaccccaacgccaaccccaacgccaacccgaacgccaaccccaacgccaaccccaacgcgaaccccaacgccaacccgaacgccaaccccaacguggaccccaacgccaaccccaacgccaacccgaacgcgaaccccaacgccaaccccaacgccaacccgaacgccaaccccaacgccaaccccaacgcgaaccccaacgccaacccgaacgccaaccccaacgccaaccccaacgcgaaccccaacgccaacccgaacgccaaccccaacgccaaccccaacgccaaccccaacgcgaacccgaacgccaaccccgccgcguaugagccgagcgacaagcacaucaaggaguaccugaacaagauccagaacucccucgcggccuacaucaagcccggcuccgcgaacaagcccaaggacgagcuggacuacgccaacgacaucgagaagaagaucugcaagauggagaagugcagcgccgccuacgccaaguucguggccgccuggacccugaaggcggccgccugaggacuaguuauaagacugacuagcccgaugggccucccaacgggcccuccuccccuccuugcaccgagauuaauaaaaaaaaaaaaaaaaaaaaaaaaaaaaaaaaaaaaaaaaaaaaaaaaaaaaaaaaaaaaaaaaugcaucccccccccccccccccccccccccccccccaaaggcucuuuucagagccaccagaauu

SEQ ID NO: 9076 - RNA, 1300 nt, Artificial Sequence
  mRNA Design i-3 (A64-N5-C30-hSL-N5) comprising derived and/or modified sequence from Pf(3D7)__XP_001351122.1__HsALB_Pf-CSP(19-272)_L(AAY)_Pf-CSP(310-3 27)_L(AAY)_Pf-CSP(346-375)_L(AAY)_PADRE_L(AAY)_P2 (opt1)
aggagaaagcuuaccaugaagugggugaccuucaucagccuccuguuccuguucuccagcgccuacucccuguuccaggaguaccagugcuacggcuccagcuccaacacccgggugcucaacgagcugaacuacgacaacgcggggaccaaccuguacaacgagcucgagaugaacuacuacggcaagcaggagaacugguacagccugaagaagaacucccgcagccugggggagaacgacgacggcaacaacgaggacaacgagaagcuccggaagcccaagcacaagaagcugaagcagccggccgacgggaaccccgaccccaacgccaaccccaacguggacccgaacgccaaccccaacgucgaccccaacgccaaccccaacguggacccgaacgcgaaccccaacgccaaccccaacgccaaccccaacgccaacccgaacgcgaaccccaacgccaaccccaacgccaaccccaacgccaacccgaacgccaaccccaacgcgaaccccaacgccaaccccaacgccaacccgaacgccaaccccaacgccaaccccaacgcgaaccccaacgccaacccgaacgccaaccccaacguggaccccaacgccaaccccaacgccaacccgaacgcgaaccccaacgccaaccccaacgccaacccgaacgccaaccccaacgccaaccccaacgcgaaccccaacgccaacccgaacgccaaccccaacgccaaccccaacgcgaaccccaacgccaacccgaacgccaaccccaacgccaaccccaacgccaaccccaacgcgaacccgaacgccaaccccgcggccuacgagccgagcgacaagcacaucaaggaguaccugaacaagauccagaacucccucgccgcguauaucaagcccggcuccgcgaacaagcccaaggacgagcuggacuacgccaacgacaucgagaagaagaucugcaagauggagaagugcagcgccgccuacgccaaguucguggccgccuggacccugaaggcggccgccgccgcuuaccaguacaucaaggccaacagcaaguucaucggcaucaccgagcugugaggacuaguuauaagacugacuagcccgaugggccucccaacgggcccuccuccccuccuugcaccgagauuaauaaaaaaaaaaaaaaaaaaaaaaaaaaaaaaaaaaaaaaaaaaaaaaaaaaaaaaaaaaaaaaaaugcaucccccccccccccccccccccccccccccccaaaggcucuuuucagagccaccagaauu

SEQ ID NO: 9077 - RNA, 1264 nt, Artificial Sequence
  mRNA Design i-3 (A64-N5-C30-hSL-N5) comprising derived and/or modified sequence from Pf(3D7)__XP_001351122.1__HsALB_Pf-CSP(19-272)_L(AAY)_Pf-CSP(310-3 27)_Linker (AAY)_Pf-CSP(346-397) (opt1)
aggagaaagcuuaccaugaagugggugaccuucaucagccuccuguuccuguucuccagcgccuacucccuguuccaggaguaccagugcuacggcuccagcuccaacacccgggugcucaacgagcugaacuacgacaacgcggggaccaaccuguacaacgagcucgagaugaacuacuacggcaagcaggagaacugguacagccugaagaagaacucccgcagccugggggagaacgacgacggcaacaacgaggacaacgagaagcuccggaagcccaagcacaagaagcugaagcagccggccgacgggaaccccgaccccaacgccaaccccaacguggacccgaacgccaaccccaacgucgaccccaacgccaaccccaacguggacccgaacgcgaaccccaacgccaaccccaacgccaaccccaacgccaacccgaacgcgaaccccaacgccaaccccaacgccaaccccaacgccaacccgaacgccaaccccaacgcgaaccccaacgccaaccccaacgccaacccgaacgccaaccccaacgccaaccccaacgcgaaccccaacgccaacccgaacgccaaccccaacguggaccccaacgccaaccccaacgccaacccgaacgcgaaccccaacgccaaccccaacgccaacccgaacgccaaccccaacgccaaccccaacgcgaaccccaacgccaacccgaacgccaaccccaacgccaaccccaacgcgaaccccaacgccaacccgaacgccaaccccaacgccaaccccaacgccaaccccaacgcgaacccgaacgccaaccccgcggccuacgagccgagcgacaagcacaucaaggaguaccugaacaagauccagaacucccucgccgcguauaucaagcccggcuccgcgaacaagcccaaggacgagcuggacuacgccaacgacaucgagaagaagaucugcaagauggagaagugcagcuccguguucaacguggucaacagcuccaucgggcugaucauggugcucagcuuccuguuccugaacugaggacuaguuauaagacugacuagcccgaugggccucccaacgggcccuccuccccuccuugcaccgagauuaauaaaaaaaaaaaaaaaaaaaaaaaaaaaaaaaaaaaaaaaaaaaaaaaaaaaaaaaaaaaaaaaaugcaucccccccccccccccccccccccccccccccaaaggcucuuuucagagccaccagaauu

SEQ ID NO: 9078 - RNA, 1864 nt, Artificial Sequence
  mRNA Design i-3 (A64-N5-C30-hSL-N5) comprising derived and/or modified sequence from Pf(3D7)__XP_001351122.1__LumSynt_L(GGS4-GGG)_Pf-CSP(19-397) (opt1)
aggagaaagcuuaccaugcagaucuacgagggcaagcugaccgccgaggggcuccgcuucggcaucguggccagccgguucaaccacgcgcuggucgaccgccugguggagggggccaucgacgccaucgugcggcacggcgggcgcgaggaggacaucacccucguccgggugcccggcuccugggagaucccgguggccgccggcgagcuggcgcgcaaggaggacaucgacgccgucaucgccaucggggugcugauccggggcgccacgccccacuucgacuacaucgcgagcgagguguccaaggggcucgccgaccugagccuggagcuccgcaagcccaucaccuucggcgucaucaccgccgacacccuggagcaggccaucgagcgggccgggacgaagcacggcaacaagggcugggaggcggcccuguccgccaucgagauggccaaccucuucaagagccugcgcgggggcuccgggggcagcggcggguccggcgggagcggcgggggccuguuccaggaguaccagugcuacggcuccagcuccaacacccgggugcucaacgagcugaacuacgacaacgccgggaccaaccuguacaacgagcucgagaugaacuacuacggcaagcaggagaacugguacagccugaagaagaacucccgcagccugggggagaacgacgacggcaacaacgaggacaacgagaagcuccggaagcccaagcacaagaagcugaagcagccggcggacgggaaccccgaccccaacgccaaccccaacguggacccgaacgccaaccccaacgucgaccccaacgccaaccccaacguggacccgaacgccaaccccaacgcgaaccccaacgccaaccccaacgccaacccgaacgccaaccccaacgccaaccccaacgcgaaccccaacgccaacccgaacgccaaccccaacgccaaccccaacgcgaaccccaacgccaacccgaacgccaaccccaacgccaaccccaacgccaaccccaacgcgaacccgaacgccaaccccaacguggaccccaacgccaacccgaacgccaaccccaacgccaaccccaacgcgaaccccaacgccaacccgaacgccaaccccaacgccaaccccaacgccaaccccaacgcgaacccgaacgccaaccccaacgccaaccccaacgccaaccccaacgcgaacccgaacgccaaccccaacgccaaccccaacgccaaccccaacgccaacccgaacgcgaaccccaacaagaacaaccagggcaacggccaggggcacaacaugcccaacgaccccaaccgcaacgucgacgagaacgccaacgccaacuccgccgugaagaacaacaacaacgaggagccgagcgacaagcacaucaaggaguaccugaacaagauccagaacucccucagcaccgaguggagccccugcuccgugacgugcggcaacgggauccagguccggaucaagcccggcagcgccaacaagcccaaggacgagcuggacuacgcgaacgacaucgagaagaagaucugcaagauggagaagugcuccagcguguucaacguggucaacuccagcaucgggcugaucauggugcucuccuuccuguuccugaacugaggacuaguuauaagacugacuagcccgaugggccucccaacgggcccuccuccccuccuugcaccgagauuaauaaaaaaaaaaaaaaaaaaaaaaaaaaaaaaaaaaaaaaaaaaaaaaaaaaaaaaaaaaaaaaaaugcaucccccccccccccccccccccccccccccccaaaggcucuuuucagagccaccagaauu

SEQ ID NO: 9079 - RNA, 1726 nt, Artificial Sequence
  mRNA Design i-3 (A64-N5-C30-hSL-N5) comprising derived and/or modified sequence from Pf(3D7)__XP_001351122.1__HsALB_Pf-CSP(19-272)_L(PVTN)_HBsAg (opt1)
aggagaaagcuuaccaugaagugggugaccuucaucagccuccuguuccuguucuccagcgccuacucccuguuccaggaguaccagugcuacggcagcuccagcaacacccgcguccucaacgagcugaacuacgacaacgccgggaccaaccuguacaacgagcucgagaugaacuacuacggcaagcaggagaacugguacucccugaagaagaacagccggucccugggggagaacgacgacggcaacaacgaggacaacgagaagcuccgcaagcccaagcacaagaagcugaagcagccggcggacgggaaccccgaccccaacgccaaccccaacguggacccgaacgccaaccccaacguggaccccaacgccaaccccaacgucgacccgaacgccaaccccaacgcgaaccccaacgccaaccccaacgccaacccgaacgccaaccccaacgcgaaccccaacgccaaccccaacgccaacccgaacgccaaccccaacgccaaccccaacgcgaaccccaacgccaacccgaacgccaaccccaacgccaaccccaacgccaaccccaacgcgaacccgaacgccaaccccaacguggaccccaacgccaaccccaacgccaacccgaacgccaaccccaacgcgaaccccaacgccaacccgaacgccaaccccaacgccaaccccaacgccaaccccaacgcgaacccgaacgccaaccccaacgccaaccccaacgccaaccccaacgcgaacccgaacgccaaccccaacgccaaccccaacgccaaccccaacgccaacccgaacgcgaacccgcccgugaccaacauggagaacaucaccagcggcuuccugggcccccuccugguccugcaggccggguucuuccuccugacccggauccugacgaucccccagucccucgacagcugguggaccucccugaacuuccugggcgggagccccgugugccucggccagaacucccagagccccaccuccaaccacagccccaccuccugcccgcccaucugccccggguaccgcuggaugugccugcggcgcuucaucaucuuccuguucauccuccugcugugccucaucuuccugcuggugcuccuggacuaccagggcaugcugcccgucugcccgcucauccccggcagcacgaccaccaacaccgggcccugcaagacgugcaccaccccggcccagggcaacagcauguuccccuccugcugcugcaccaagcccacggacgggaacugcacgugcauccccaucccgagcuccugggccuucgccaaguaccugugggagugggcgagcgugcgguucuccuggcugagccuccuggugcccuucguccagugguucgugggccugucccccaccguguggcucagcgccaucuggaugaugugguacuggggccccucccuguacagcaucgucuccccguucaucccccugcuccccaucuucuucugccuguggguguacaucugaggacuaguuauaagacugacuagcccgaugggccucccaacgggcccuccuccccuccuugcaccgagauuaauaaaaaaaaaaaaaaaaaaaaaaaaaaaaaaaaaaaaaaaaaaaaaaaaaaaaaaaaaaaaaaaaugcaucccccccccccccccccccccccccccccccaaaggcucuuuucagagccaccagaauu

SEQ ID NO: 9080 - RNA, 1843 nt, Artificial Sequence
  mRNA Design i-3 (A64-N5-C30-hSL-N5) comprising derived and/or modified sequence from Pf(3D7)__XP_001351122.1__HsALB_Pf-CSP(19-272)_L(AAY)_Pf-CSP(346-3 65)_L(AAY)_PADRE_L(PVTN)_HBsAg (opt1)
aggagaaagcuuaccaugaagugggugaccuucaucagccugcuguuccuguucuccagcgccuacucccuguuccaggaguaccagugcuacggcagcuccagcaacacccgcguccucaacgagcugaacuacgacaacgccgggaccaaccuguacaacgagcucgagaugaacuacuacggcaagcaggagaacugguacucccugaagaagaacagccggucccugggggagaacgacgacggcaacaacgaggacaacgagaagcuccgcaagcccaagcacaagaagcugaagcagccggcggacgggaaccccgaccccaacgccaaccccaacguggacccgaacgccaaccccaacguggaccccaacgccaaccccaacgucgacccgaacgccaaccccaacgcgaaccccaacgccaaccccaacgccaacccgaacgccaaccccaacgcgaaccccaacgccaaccccaacgccaacccgaacgccaaccccaacgccaaccccaacgcgaaccccaacgccaacccgaacgccaaccccaacgccaaccccaacgccaaccccaacgcgaacccgaacgccaaccccaacguggaccccaacgccaaccccaacgccaacccgaacgccaaccccaacgcgaaccccaacgccaacccgaacgccaaccccaacgccaaccccaacgccaaccccaacgcgaacccgaacgccaaccccaacgccaaccccaacgccaaccccaacgcgaacccgaacgccaaccccaacgccaaccccaacgccaaccccaacgccaacccgaacgcgaaccccgccgccuacaucaagcccggcagcgccaacaagcccaaggacgagcuggacuacgccaacgacaucgaggcggccuacgccaaguucguggccgccuggacccucaaggcggccgccccggucaccaacauggagaacaucaccuccggcuuccuggggccccugcucgugcugcaggccggcuucuuccugcucacgcggauccugaccaucccccagagccuggacuccugguggaccagccucaacuuccucgggggcucccccgugugccuggggcagaacagccaguccccgaccagcaaccacucccccacgagcugcccgcccaucugccccggcuaccgcuggaugugccuccggcgcuucaucaucuuccuguucauccugcuccugugccugaucuuccuccugguccugcucgacuaccagggcaugcugcccgugugcccccugaucccggggagcaccaccaccaacacgggccccugcaagaccugcaccacccccgcgcaggggaacuccauguuccccagcugcugcugcacgaagccgaccgacggcaacugcacgugcauccccauccccuccagcugggccuucgccaaguaccucugggagugggccuccgugcgguucagcuggcugucccugcucguccccuucgugcagugguucgugggccugagcccgaccgucuggcuguccgccaucuggaugaugugguacugggggcccagccucuacuccaucgugagccccuucaucccccugcugccgaucuucuucugccucuggguguacaucugaggacuaguuauaagacugacuagcccgaugggccucccaacgggcccuccuccccuccuugcaccgagauuaauaaaaaaaaaaaaaaaaaaaaaaaaaaaaaaaaaaaaaaaaaaaaaaaaaaaaaaaaaaaaaaaaugcaucccccccccccccccccccccccccccccccaaaggcucuuuucagagccaccagaauu

SEQ ID NO: 9081 - RNA, 2062 nt, Artificial Sequence
  mRNA Design i-3 (A64-N5-C30-hSL-N5) comprising derived and/or modified sequence from Pf(3D7)__XP_001351122.1__HsALB_Pf-CSP(19-384)_L(PVTN)_HBsAg (opt1)
aggagaaagcuuaccaugaagugggugaccuucaucagccugcuguuccuguucuccagcgccuacucccuguuccaggaguaccagugcuacggcagcuccagcaacacccgcguccucaacgagcugaacuacgacaacgccgggacgaaccuguacaacgagcucgagaugaacuacuacggcaagcaggagaacugguacucccugaagaagaacagccggucccugggggagaacgacgacggcaacaacgaggacaacgagaagcuccgcaagcccaagcacaagaagcugaagcagccggcggacgggaaccccgaccccaacgccaaccccaacguggacccgaacgccaaccccaacguggaccccaacgccaaccccaacgucgacccgaacgccaaccccaacgcgaaccccaacgccaaccccaacgccaacccgaacgccaaccccaacgcgaaccccaacgccaaccccaacgccaacccgaacgccaaccccaacgccaaccccaacgcgaaccccaacgccaacccgaacgccaaccccaacgccaaccccaacgccaaccccaacgcgaacccgaacgccaaccccaacguggaccccaacgccaaccccaacgccaacccgaacgccaaccccaacgcgaaccccaacgccaacccgaacgccaaccccaacgccaaccccaacgccaaccccaacgcgaacccgaacgccaaccccaacgccaaccccaacgccaaccccaacgcgaacccgaacgccaaccccaacgccaaccccaacgccaaccccaacgccaacccgaacgcgaaccccaacaagaacaaccagggcaacggccaggggcacaacaugcccaacgaccccaaccggaacguggacgagaacgccaacgccaacagcgccgucaagaacaacaacaacgaggagccguccgacaagcacaucaaggaguaccugaacaagauccagaacagccucuccaccgaguggagccccugcuccgugaccugcggcaacgggauccaggugcgcaucaagcccggcagcgccaacaagcccaaggacgagcuggacuacgcgaacgacaucgagaagaagaucugcaagauggagaagugcuccagcgucuucaacguggugaacuccagcccggucaccaacauggagaacaucacgagcggguuccugggcccccuccuggugcugcaggccggcuucuuccuccugacccggauccugaccaucccccagucccucgacagcugguggaccucccugaacuuccucgggggcagccccgugugccucgggcagaacucccagagcccgacguccaaccacagccccaccuccugcccgcccaucugccccggcuaccgcuggaugugccugcggcgcuucaucaucuuccuguucauccuccugcugugccucaucuuccugcugguccuccuggacuaccagggcaugcugcccgugugcccccucaucccggggagcaccaccacgaacaccggccccugcaagaccugcaccacgcccgcccaggggaacuccauguuccccagcugcugcugcaccaagccgaccgacggcaacugcacgugcauccccauccccuccagcugggccuucgccaaguaccugugggagugggcguccgugcgguucagcuggcugucccuccugguccccuucgugcagugguucguggggcugagcccgaccgucuggcucuccgccaucuggaugaugugguacuggggccccagccuguacagcaucgugucccccuucaucccccugcucccgaucuucuucugccuguggguguacaucugaggacuaguuauaagacugacuagcccgaugggccucccaacgggcccuccuccccuccuugcaccgagauuaauaaaaaaaaaaaaaaaaaaaaaaaaaaaaaaaaaaaaaaaaaaaaaaaaaaaaaaaaaaaaaaaaugcaucccccccccccccccccccccccccccccccaaaggcucuuuucagagccaccagaauu

SEQ ID NO: 9082 - RNA, 1879 nt, Artificial Sequence
  mRNA Design i-3 (A64-N5-C30-hSL-N5) comprising derived and/or modified sequence from Pf(3D7)__XP_001351122.1__HsALB_Pf-CSP(19-384)_L(SGG)_Ferritin (opt1)
aggagaaagcuuaccaugaagugggugaccuucaucagccuccuguuccuguucuccagcgccuacucccuguuccaggaguaccagugcuacggcagcuccagcaacacccggguccucaacgagcugaacuacgacaacgccgggacgaaccuguacaacgagcucgagaugaacuacuacggcaagcaggagaacugguacucccugaagaagaacagccggucccugggggagaacgacgacggcaacaacgaggacaacgagaagcuccgcaagcccaagcacaagaagcugaagcagccggcggacgggaaccccgaccccaacgccaaccccaacguggacccgaacgccaaccccaacguggaccccaacgccaaccccaacgucgacccgaacgccaaccccaacgcgaaccccaacgccaaccccaacgccaacccgaacgccaaccccaacgcgaaccccaacgccaaccccaacgccaacccgaacgccaaccccaacgccaaccccaacgcgaaccccaacgccaacccgaacgccaaccccaacgccaaccccaacgccaaccccaacgcgaacccgaacgccaaccccaacguggaccccaacgccaaccccaacgccaacccgaacgccaaccccaacgcgaaccccaacgccaacccgaacgccaaccccaacgccaaccccaacgccaaccccaacgcgaacccgaacgccaaccccaacgccaaccccaacgccaaccccaacgcgaacccgaacgccaaccccaacgccaaccccaacgccaaccccaacgccaacccgaacgcgaaccccaacaagaacaaccagggcaacggccaggggcacaacaugcccaacgaccccaaccggaacguggacgagaacgccaacgccaacagcgccgucaagaacaacaacaacgaggagccguccgacaagcacaucaaggaguaccugaacaagauccagaacagccucuccaccgaguggagccccugcuccgugaccugcggcaacgggauccaggugcgcaucaagcccggcagcgccaacaagcccaaggacgagcuggacuacgcgaacgacaucgagaagaagaucugcaagauggagaagugcuccagcgucuucaacguggugaacuccagcagcgggggccuguccaaggacaucaucaagcuccugaacgagcaggucaacaaggagaugaacagcuccaaccuguacaugagcauguccagcuggugcuacacccacucccucgacggcgccgggcuguuccuguucgaccacgccgccgaggaguacgagcacgccaagaagcucaucaucuuccugaacgagaacaacgugccggugcagcugacgagcaucuccgcgcccgagcacaaguucgagggccucacccagaucuuccagaaggccuacgagcacgagcagcacaucagcgaguccaucaacaacaucgucgaccacgccaucaagagcaaggaccacgccaccuucaacuuccugcagugguacguggcggagcagcacgaggaggaggugcuguucaaggacauccucgacaagaucgagcugaucgggaacgagaaccacggccuguaccucgccgaccaguacgucaagggcaucgccaagucccgcaagagcugaggacuaguuauaagacugacuagcccgaugggccucccaacgggcccuccuccccuccuugcaccgagauuaauaaaaaaaaaaaaaaaaaaaaaaaaaaaaaaaaaaaaaaaaaaaaaaaaaaaaaaaaaaaaaaaaugcaucccccccccccccccccccccccccccccccaaaggcucuuuucagagccaccagaauu

SEQ ID NO: 9083 - RNA, 1840 nt, Artificial Sequence
  mRNA Design i-3 (A64-N5-C30-hSL-N5) comprising derived and/or modified sequence from Pf(3D7)__XP_001351122.1__HsALB_Pf-CSP(93-384)_L(PVTN)_HBsAg (opt1)
aggagaaagcuuaccaugaagugggugaccuucaucagccuccuguuccuguucuccagcgccuacuccaagcugaagcagcccgccgacggcaacccggaccccaacgcgaaccccaacgucgaccccaacgccaacccgaacguggaccccaacgccaaccccaacguggaccccaacgccaacccgaacgccaaccccaacgcgaaccccaacgccaaccccaacgccaacccgaacgccaaccccaacgcgaaccccaacgccaaccccaacgccaacccgaacgccaaccccaacgccaaccccaacgcgaaccccaacgccaacccgaacgccaaccccaacgccaaccccaacgccaaccccaacgcgaacccgaacgucgaccccaacgccaaccccaacgccaaccccaacgccaacccgaacgccaaccccaacgcgaaccccaacgccaacccgaacgccaaccccaacgccaaccccaacgccaaccccaacgcgaacccgaacgccaaccccaacgccaaccccaacgccaaccccaacgcgaacccgaacgccaaccccaacgccaaccccaacgccaaccccaacgccaacccgaacaagaacaaccaggggaacggccaggggcacaacaugcccaacgaccccaaccgcaacguggacgagaacgcgaacgccaacagcgccgugaagaacaacaacaacgaggagcccuccgacaagcacaucaaggaguaccucaacaagauccagaacagccuguccaccgaguggagcccgugcuccgugaccugcggcaacgggauccagguccggaucaagcccggcagcgccaacaagcccaaggacgagcuggacuacgccaacgacaucgagaagaagaucugcaagauggagaagugcuccagcguguucaacgucgugaacuccagccccgugaccaacauggagaacaucaccuccggcuuccucgggccgcugcugguccuccaggcgggcuucuuccugcugacccgcauccucacgaucccccagagccuggacuccugguggaccagccugaacuuccucgggggcucccccgugugccuggggcagaacagccagagccccaccuccaaccacagcccgaccuccugcccgcccaucugccccggcuaccgguggaugugccugcgccgguucaucaucuuccucuucauccugcugcucugccugaucuuccugcucgugcugcuggacuaccagggcaugcuccccgucugcccccugauccccgggagcacgaccaccaacaccggcccgugcaagacgugcaccacccccgcccaggggaacuccauguuccccagcugcugcugcaccaagcccacggacggcaacugcacgugcaucccgauccccuccagcugggccuucgccaaguaccugugggagugggccuccgugcgcuucagcuggcucucccugcuggugcccuucguccagugguucgugggccucagccccaccguguggcuguccgcgaucuggaugaugugguacugggggccgagccuguacuccaucgucagccccuucaucccccuccugcccaucuucuucugccuguggguguacaucugaggacuaguuauaagacugacuagcccgaugggccucccaacgggcccuccuccccuccuugcaccgagauuaauaaaaaaaaaaaaaaaaaaaaaaaaaaaaaaaaaaaaaaaaaaaaaaaaaaaaaaaaaaaaaaaaugcaucccccccccccccccccccccccccccccccaaaggcucuuuucagagccaccagaauu

SEQ ID NO: 9084 - RNA, 1501 nt, Artificial Sequence; identical to SEQ ID NO: 1858
  mRNA Design i-3 (A64-N5-C30-hSL-N5) comprising derived and/or modified sequence from Pf(3D7)__XP_001351122.1__HsALB_Pf-CSP(199-377)_L(PVTN)_HBsAg (opt1)

SEQ ID NO: 9085 - RNA, 1198 nt, Artificial Sequence
  mRNA Design i-3 (A64-N5-C30-hSL-N5) comprising derived and/or modified sequence from Pf(3D7)__XP_001351122.1__HsALB_Pf-CSP(19-272)_L(AAY)_Pf-CSP(346-3 75)_L(AAY)_Pf-CSP(310-327) (opt1)
aggagaaagcuuaccaugaagugggugaccuucaucagccuccuguuccuguucuccagcgccuacucccuguuccaggaguaccagugcuacggcagcuccagcaacacccgcguccucaacgagcugaacuacgacaacgccgggacgaaccuguacaacgagcucgagaugaacuacuacggcaagcaggagaacugguacucccugaagaagaacagccggucccugggggagaacgacgacggcaacaacgaggacaacgagaagcuccgcaagcccaagcacaagaagcugaagcagccggcggacgggaaccccgaccccaacgccaaccccaacguggacccgaacgccaaccccaacguggaccccaacgccaaccccaacgucgacccgaacgccaaccccaacgcgaaccccaacgccaaccccaacgccaacccgaacgccaaccccaacgcgaaccccaacgccaaccccaacgccaacccgaacgccaaccccaacgccaaccccaacgcgaaccccaacgccaacccgaacgccaaccccaacgccaaccccaacgccaaccccaacgcgaacccgaacgccaaccccaacguggaccccaacgccaaccccaacgccaacccgaacgccaaccccaacgcgaaccccaacgccaacccgaacgccaaccccaacgccaaccccaacgccaaccccaacgcgaacccgaacgccaaccccaacgccaaccccaacgccaaccccaacgcgaacccgaacgccaaccccaacgccaaccccaacgccaaccccaacgccaacccgaacgcgaaccccgccgccuacaucaagcccggcagcgccaacaagcccaaggacgagcuggacuacgccaacgacaucgagaagaagaucugcaagauggagaagugcuccgcggccuacgagccgagcgacaagcacaucaaggaguaccucaacaagauccagaacucccugugaggacuaguuauaagacugacuagcccgaugggccucccaacgggcccuccuccccuccuugcaccgagauuaauaaaaaaaaaaaaaaaaaaaaaaaaaaaaaaaaaaaaaaaaaaaaaaaaaaaaaaaaaaaaaaaaugcaucccccccccccccccccccccccccccccccaaaggcucuuuucagagccaccagaauu

SEQ ID NO: 9086 - RNA, 1246 nt, Artificial Sequence
  mRNA Design i-3 (A64-N5-C30-hSL-N5) comprising derived and/or modified sequence from Pf(3D7)__XP_001351122.1__HsALB_Pf-CSP(19-272)_L(AAY)_Pf-CSP(346-3 75)_L(AAY)_Pf-CSP(310-327)_L(AAY)_PADRE (opt1)
aggagaaagcuuaccaugaagugggugaccuucaucagccuccuguuccuguucuccagcgccuacucccuguuccaggaguaccagugcuacggcagcuccagcaacacccgcguccucaacgagcugaacuacgacaacgccgggacgaaccuguacaacgagcucgagaugaacuacuacggcaagcaggagaacugguacucccugaagaagaacagccggucccugggggagaacgacgacggcaacaacgaggacaacgagaagcuccgcaagcccaagcacaagaagcugaagcagccggcggacgggaaccccgaccccaacgccaaccccaacguggacccgaacgccaaccccaacguggaccccaacgccaaccccaacgucgacccgaacgccaaccccaacgcgaaccccaacgccaaccccaacgccaacccgaacgccaaccccaacgcgaaccccaacgccaaccccaacgccaacccgaacgccaaccccaacgccaaccccaacgcgaaccccaacgccaacccgaacgccaaccccaacgccaaccccaacgccaaccccaacgcgaacccgaacgccaaccccaacguggaccccaacgccaaccccaacgccaacccgaacgccaaccccaacgcgaaccccaacgccaacccgaacgccaaccccaacgccaaccccaacgccaaccccaacgcgaacccgaacgccaaccccaacgccaaccccaacgccaaccccaacgcgaacccgaacgccaaccccaacgccaaccccaacgccaaccccaacgccaacccgaacgcgaaccccgccgccuacaucaagcccggcagcgccaacaagcccaaggacgagcuggacuacgccaacgacaucgagaagaagaucugcaagauggagaagugcuccgcggccuacgagccgagcgacaagcacaucaaggaguaccucaacaagauccagaacucccuggccgccuacgccaaguucguggcggccuggacccugaaggccgccgcgugaggacuaguuauaagacugacuagcccgaugggccucccaacgggcccuccuccccuccuugcaccgagauuaauaaaaaaaaaaaaaaaaaaaaaaaaaaaaaaaaaaaaaaaaaaaaaaaaaaaaaaaaaaaaaaaaugcaucccccccccccccccccccccccccccccccaaaggcucuuuucagagccaccagaauu

SEQ ID NO: 9087 - RNA, 1246 nt, Artificial Sequence
  mRNA Design i-3 (A64-N5-C30-hSL-N5) comprising derived and/or modified sequence from Pf(3D7)__XP_001351122.1__HsALB_Pf-CSP(19-272)_L(AAY)_Pf-CSP(310-3 27)_L(AAY)_Pf-CSP(346-375)_L(AAY)_PADRE (opt1)
aggagaaagcuuaccaugaagugggugaccuucaucagccuccuguuccuguucuccagcgccuacucccuguuccaggaguaccagugcuacggcagcuccagcaacacccgcguccucaacgagcugaacuacgacaacgccgggacgaaccuguacaacgagcucgagaugaacuacuacggcaagcaggagaacugguacucccugaagaagaacagccggucccugggggagaacgacgacggcaacaacgaggacaacgagaagcuccgcaagcccaagcacaagaagcugaagcagccggcggacgggaaccccgaccccaacgccaaccccaacguggacccgaacgccaaccccaacguggaccccaacgccaaccccaacgucgacccgaacgccaaccccaacgcgaaccccaacgccaaccccaacgccaacccgaacgccaaccccaacgcgaaccccaacgccaaccccaacgccaacccgaacgccaaccccaacgccaaccccaacgcgaaccccaacgccaacccgaacgccaaccccaacgccaaccccaacgccaaccccaacgcgaacccgaacgccaaccccaacguggaccccaacgccaaccccaacgccaacccgaacgccaaccccaacgcgaaccccaacgccaacccgaacgccaaccccaacgccaaccccaacgccaaccccaacgcgaacccgaacgccaaccccaacgccaaccccaacgccaaccccaacgcgaacccgaacgccaaccccaacgccaaccccaacgccaaccccaacgccaacccgaacgcgaaccccgccgccuacgagcccagcgacaagcacaucaaggaguaccugaacaagauccagaacucccucgccgccuacaucaagcccggcagcgcgaacaagccgaaggacgagcuggacuacgccaacgacaucgagaagaagaucugcaagauggagaagugcuccgccgccuacgccaaguucguggcggccuggacccugaaggccgccgcgugaggacuaguuauaagacugacuagcccgaugggccucccaacgggcccuccuccccuccuugcaccgagauuaauaaaaaaaaaaaaaaaaaaaaaaaaaaaaaaaaaaaaaaaaaaaaaaaaaaaaaaaaaaaaaaaaugcaucccccccccccccccccccccccccccccccaaaggcucuuuucagagccaccagaauu

SEQ ID NO: 9088 - RNA, 1300 nt, Artificial Sequence
  mRNA Design i-3 (A64-N5-C30-hSL-N5) comprising derived and/or modified sequence from Pf(3D7)__XP_001351122.1__HsALB_Pf-CSP(19-272)_L(AAY)_Pf-CSP(310-3 27)_L(AAY)_Pf-CSP(346-375)_L(AAY)_PADRE_L(AAY)_P2 (opt1)
aggagaaagcuuaccaugaagugggugaccuucaucagccuccuguuccuguucuccagcgccuacucccuguuccaggaguaccagugcuacggcagcuccagcaacacccgcguccucaacgagcugaacuacgacaacgccgggacgaaccuguacaacgagcucgagaugaacuacuacggcaagcaggagaacugguacucccugaagaagaacagccggucccugggggagaacgacgacggcaacaacgaggacaacgagaagcuccgcaagcccaagcacaagaagcugaagcagccggcggacgggaaccccgaccccaacgccaaccccaacguggacccgaacgccaaccccaacguggaccccaacgccaaccccaacgucgacccgaacgccaaccccaacgcgaaccccaacgccaaccccaacgccaacccgaacgccaaccccaacgcgaaccccaacgccaaccccaacgccaacccgaacgccaaccccaacgccaaccccaacgcgaaccccaacgccaacccgaacgccaaccccaacgccaaccccaacgccaaccccaacgcgaacccgaacgccaaccccaacguggaccccaacgccaaccccaacgccaacccgaacgccaaccccaacgcgaaccccaacgccaacccgaacgccaaccccaacgccaaccccaacgccaaccccaacgcgaacccgaacgccaaccccaacgccaaccccaacgccaaccccaacgcgaacccgaacgccaaccccaacgccaaccccaacgccaaccccaacgccaacccgaacgcgaaccccgccgccuacgagcccagcgacaagcacaucaaggaguaccugaacaagauccagaacucccucgccgccuacaucaagcccggcagcgcgaacaagccgaaggacgagcuggacuacgccaacgacaucgagaagaagaucugcaagauggagaagugcuccgccgccuacgccaaguucguggcggccuggacccugaaggccgccgcggccgccuaccaguacaucaaggccaacagcaaguucaucggcaucaccgagcucugaggacuaguuauaagacugacuagcccgaugggccucccaacgggcccuccuccccuccuugcaccgagauuaauaaaaaaaaaaaaaaaaaaaaaaaaaaaaaaaaaaaaaaaaaaaaaaaaaaaaaaaaaaaaaaaaugcaucccccccccccccccccccccccccccccccaaaggcucuuuucagagccaccagaauu

SEQ ID NO: 9089 - RNA, 1264 nt, Artificial Sequence
  mRNA Design i-3 (A64-N5-C30-hSL-N5) comprising derived and/or modified sequence from Pf(3D7)__XP_001351122.1__HsALB_Pf-CSP(19-272)_L(AAY)_Pf-CSP(310-3 27)_Linker (AAY)_Pf-CSP(346-397) (opt1)
aggagaaagcuuaccaugaagugggugaccuucaucagccuccuguuccuguucuccagcgccuacucccuguuccaggaguaccagugcuacggcagcuccagcaacacccgcguccucaacgagcugaacuacgacaacgccgggacgaaccuguacaacgagcucgagaugaacuacuacggcaagcaggagaacugguacucccugaagaagaacagccggucccugggggagaacgacgacggcaacaacgaggacaacgagaagcuccgcaagcccaagcacaagaagcugaagcagccggcggacgggaaccccgaccccaacgccaaccccaacguggacccgaacgccaaccccaacguggaccccaacgccaaccccaacgucgacccgaacgccaaccccaacgcgaaccccaacgccaaccccaacgccaacccgaacgccaaccccaacgcgaaccccaacgccaaccccaacgccaacccgaacgccaaccccaacgccaaccccaacgcgaaccccaacgccaacccgaacgccaaccccaacgccaaccccaacgccaaccccaacgcgaacccgaacgccaaccccaacguggaccccaacgccaaccccaacgccaacccgaacgccaaccccaacgcgaaccccaacgccaacccgaacgccaaccccaacgccaaccccaacgccaaccccaacgcgaacccgaacgccaaccccaacgccaaccccaacgccaaccccaacgcgaacccgaacgccaaccccaacgccaaccccaacgccaaccccaacgccaacccgaacgcgaaccccgccgccuacgagcccagcgacaagcacaucaaggaguaccugaacaagauccagaacucccucgccgccuacaucaagcccggcagcgcgaacaagccgaaggacgagcuggacuacgccaacgacaucgagaagaagaucugcaagauggagaagugcuccagcguguucaacgucgugaacuccagcaucggccugaucauggugcucuccuuccuguuccugaacugaggacuaguuauaagacugacuagcccgaugggccucccaacgggcccuccuccccuccuugcaccgagauuaauaaaaaaaaaaaaaaaaaaaaaaaaaaaaaaaaaaaaaaaaaaaaaaaaaaaaaaaaaaaaaaaaugcaucccccccccccccccccccccccccccccccaaaggcucuuuucagagccaccagaauu

SEQ ID NO: 9090 - RNA, 1864 nt, Artificial Sequence
  mRNA Design i-3 (A64-N5-C30-hSL-N5) comprising derived and/or modified sequence from Pf(3D7)__XP_001351122.1__LumSynt_L(GGS4-GGG)_Pf-CSP(19-397) (opt2)
aggagaaagcuuaccaugcagaucuacgagggcaagcucaccgccgagggccuccgcuucggcaucgucgccucccgcuucaaccacgcccucgucgaccgccucgucgagggcgccaucgacgccaucguccgccacggcggccgcgaggaggacaucacccucguccgcguccccggcuccugggagauccccgucgccgccggcgagcucgcccgcaaggaggacaucgacgccgucaucgccaucggcguccucauccgcggcgccaccccccacuucgacuacaucgccuccgaggucuccaagggccucgccgaccucucccucgagcuccgcaagcccaucaccuucggcgucaucaccgccgacacccucgagcaggccaucgagcgcgccggcaccaagcacggcaacaagggcugggaggccgcccucuccgccaucgagauggccaaccucuucaagucccuccgcggcggcuccggcggcuccggcggcuccggcggcuccggcggcggccucuuccaggaguaccagugcuacggcuccuccuccaacacccgcguccucaacgagcucaacuacgacaacgccggcaccaaccucuacaacgagcucgagaugaacuacuacggcaagcaggagaacugguacucccucaagaagaacucccgcucccucggcgagaacgacgacggcaacaacgaggacaacgagaagcuccgcaagcccaagcacaagaagcucaagcagcccgccgacggcaaccccgaccccaacgccaaccccaacgucgaccccaacgccaaccccaacgucgaccccaacgccaaccccaacgucgaccccaacgccaaccccaacgccaaccccaacgccaaccccaacgccaaccccaacgccaaccccaacgccaaccccaacgccaaccccaacgccaaccccaacgccaaccccaacgccaaccccaacgccaaccccaacgccaaccccaacgccaaccccaacgccaaccccaacgccaaccccaacgccaaccccaacgccaaccccaacgucgaccccaacgccaaccccaacgccaaccccaacgccaaccccaacgccaaccccaacgccaaccccaacgccaaccccaacgccaaccccaacgccaaccccaacgccaaccccaacgccaaccccaacgccaaccccaacgccaaccccaacgccaaccccaacgccaaccccaacgccaaccccaacgccaaccccaacgccaaccccaacgccaaccccaacaagaacaaccagggcaacggccagggccacaacaugcccaacgaccccaaccgcaacgucgacgagaacgccaacgccaacuccgccgucaagaacaacaacaacgaggagcccuccgacaagcacaucaaggaguaccucaacaagauccagaacucccucuccaccgaguggucccccugcuccgucaccugcggcaacggcauccagguccgcaucaagcccggcuccgccaacaagcccaaggacgagcucgacuacgccaacgacaucgagaagaagaucugcaagauggagaagugcuccuccgucuucaacgucgucaacuccuccaucggccucaucaugguccucuccuuccucuuccucaacugaggacuaguuauaagacugacuagcccgaugggccucccaacgggcccuccuccccuccuugcaccgagauuaauaaaaaaaaaaaaaaaaaaaaaaaaaaaaaaaaaaaaaaaaaaaaaaaaaaaaaaaaaaaaaaaaugcaucccccccccccccccccccccccccccccccaaaggcucuuuucagagccaccagaauu

SEQ ID NO: 9091 - RNA, 1726 nt, Artificial Sequence
  mRNA Design i-3 (A64-N5-C30-hSL-N5) comprising derived and/or modified sequence from Pf(3D7)__XP_001351122.1__HsALB_Pf-CSP(19-272)_L(PVTN)_HBsAg (opt2)
aggagaaagcuuaccaugaagugggucaccuucaucucccuccucuuccucuucuccuccgccuacucccucuuccaggaguaccagugcuacggcuccuccuccaacacccgcguccucaacgagcucaacuacgacaacgccggcaccaaccucuacaacgagcucgagaugaacuacuacggcaagcaggagaacugguacucccucaagaagaacucccgcucccucggcgagaacgacgacggcaacaacgaggacaacgagaagcuccgcaagcccaagcacaagaagcucaagcagcccgccgacggcaaccccgaccccaacgccaaccccaacgucgaccccaacgccaaccccaacgucgaccccaacgccaaccccaacgucgaccccaacgccaaccccaacgccaaccccaacgccaaccccaacgccaaccccaacgccaaccccaacgccaaccccaacgccaaccccaacgccaaccccaacgccaaccccaacgccaaccccaacgccaaccccaacgccaaccccaacgccaaccccaacgccaaccccaacgccaaccccaacgccaaccccaacgccaaccccaacgucgaccccaacgccaaccccaacgccaaccccaacgccaaccccaacgccaaccccaacgccaaccccaacgccaaccccaacgccaaccccaacgccaaccccaacgccaaccccaacgccaaccccaacgccaaccccaacgccaaccccaacgccaaccccaacgccaaccccaacgccaaccccaacgccaaccccaacgccaaccccaacgccaacccccccgucaccaacauggagaacaucaccuccggcuuccucggcccccuccucguccuccaggccggcuucuuccuccucacccgcauccucaccaucccccagucccucgacuccugguggaccucccucaacuuccucggcggcucccccgucugccucggccagaacucccagucccccaccuccaaccacucccccaccuccugcccccccaucugccccggcuaccgcuggaugugccuccgccgcuucaucaucuuccucuucauccuccuccucugccucaucuuccuccucguccuccucgacuaccagggcaugcuccccgucugcccccucauccccggcuccaccaccaccaacaccggccccugcaagaccugcaccacccccgcccagggcaacuccauguuccccuccugcugcugcaccaagcccaccgacggcaacugcaccugcauccccauccccuccuccugggccuucgccaaguaccucugggagugggccuccguccgcuucuccuggcucucccuccucguccccuucguccagugguucgucggccucucccccaccgucuggcucuccgccaucuggaugaugugguacuggggccccucccucuacuccaucgucucccccuucaucccccuccuccccaucuucuucugccucugggucuacaucugaggacuaguuauaagacugacuagcccgaugggccucccaacgggcccuccuccccuccuugcaccgagauuaauaaaaaaaaaaaaaaaaaaaaaaaaaaaaaaaaaaaaaaaaaaaaaaaaaaaaaaaaaaaaaaaaugcaucccccccccccccccccccccccccccccccaaaggcucuuuucagagccaccagaauu

SEQ ID NO: 9092 - RNA, 1843 nt, Artificial Sequence
  mRNA Design i-3 (A64-N5-C30-hSL-N5) comprising derived and/or modified sequence from Pf(3D7)__XP_001351122.1__HsALB_Pf-CSP(19-272)_L(AAY)_Pf-CSP(346-3 65)_L(AAY)_PADRE_L(PVTN)_HBsAg (opt2)
aggagaaagcuuaccaugaagugggucaccuucaucucccuccucuuccucuucuccuccgccuacucccucuuccaggaguaccagugcuacggcuccuccuccaacacccgcguccucaacgagcucaacuacgacaacgccggcaccaaccucuacaacgagcucgagaugaacuacuacggcaagcaggagaacugguacucccucaagaagaacucccgcucccucggcgagaacgacgacggcaacaacgaggacaacgagaagcuccgcaagcccaagcacaagaagcucaagcagcccgccgacggcaaccccgaccccaacgccaaccccaacgucgaccccaacgccaaccccaacgucgaccccaacgccaaccccaacgucgaccccaacgccaaccccaacgccaaccccaacgccaaccccaacgccaaccccaacgccaaccccaacgccaaccccaacgccaaccccaacgccaaccccaacgccaaccccaacgccaaccccaacgccaaccccaacgccaaccccaacgccaaccccaacgccaaccccaacgccaaccccaacgccaaccccaacgccaaccccaacgucgaccccaacgccaaccccaacgccaaccccaacgccaaccccaacgccaaccccaacgccaaccccaacgccaaccccaacgccaaccccaacgccaaccccaacgccaaccccaacgccaaccccaacgccaaccccaacgccaaccccaacgccaaccccaacgccaaccccaacgccaaccccaacgccaaccccaacgccaaccccaacgccaaccccgccgccuacaucaagcccggcuccgccaacaagcccaaggacgagcucgacuacgccaacgacaucgaggccgccuacgccaaguucgucgccgccuggacccucaaggccgccgcccccgucaccaacauggagaacaucaccuccggcuuccucggcccccuccucguccuccaggccggcuucuuccuccucacccgcauccucaccaucccccagucccucgacuccugguggaccucccucaacuuccucggcggcucccccgucugccucggccagaacucccagucccccaccuccaaccacucccccaccuccugcccccccaucugccccggcuaccgcuggaugugccuccgccgcuucaucaucuuccucuucauccuccuccucugccucaucuuccuccucguccuccucgacuaccagggcaugcuccccgucugcccccucauccccggcuccaccaccaccaacaccggccccugcaagaccugcaccacccccgcccagggcaacuccauguuccccuccugcugcugcaccaagcccaccgacggcaacugcaccugcauccccauccccuccuccugggccuucgccaaguaccucugggagugggccuccguccgcuucuccuggcucucccuccucguccccuucguccagugguucgucggccucucccccaccgucuggcucuccgccaucuggaugaugugguacuggggccccucccucuacuccaucgucucccccuucaucccccuccuccccaucuucuucugccucugggucuacaucugaggacuaguuauaagacugacuagcccgaugggccucccaacgggcccuccuccccuccuugcaccgagauuaauaaaaaaaaaaaaaaaaaaaaaaaaaaaaaaaaaaaaaaaaaaaaaaaaaaaaaaaaaaaaaaaaugcaucccccccccccccccccccccccccccccccaaaggcucuuuucagagccaccagaauu

SEQ ID NO: 9093 - RNA, 2062 nt, Artificial Sequence
  mRNA Design i-3 (A64-N5-C30-hSL-N5) comprising derived and/or modified sequence from Pf(3D7)__XP_001351122.1__HsALB_Pf-CSP(19-384)_L(PVTN)_HBsAg (opt2)
aggagaaagcuuaccaugaagugggucaccuucaucucccuccucuuccucuucuccuccgccuacucccucuuccaggaguaccagugcuacggcuccuccuccaacacccgcguccucaacgagcucaacuacgacaacgccggcaccaaccucuacaacgagcucgagaugaacuacuacggcaagcaggagaacugguacucccucaagaagaacucccgcucccucggcgagaacgacgacggcaacaacgaggacaacgagaagcuccgcaagcccaagcacaagaagcucaagcagcccgccgacggcaaccccgaccccaacgccaaccccaacgucgaccccaacgccaaccccaacgucgaccccaacgccaaccccaacgucgaccccaacgccaaccccaacgccaaccccaacgccaaccccaacgccaaccccaacgccaaccccaacgccaaccccaacgccaaccccaacgccaaccccaacgccaaccccaacgccaaccccaacgccaaccccaacgccaaccccaacgccaaccccaacgccaaccccaacgccaaccccaacgccaaccccaacgccaaccccaacgucgaccccaacgccaaccccaacgccaaccccaacgccaaccccaacgccaaccccaacgccaaccccaacgccaaccccaacgccaaccccaacgccaaccccaacgccaaccccaacgccaaccccaacgccaaccccaacgccaaccccaacgccaaccccaacgccaaccccaacgccaaccccaacgccaaccccaacgccaaccccaacgccaaccccaacaagaacaaccagggcaacggccagggccacaacaugcccaacgaccccaaccgcaacgucgacgagaacgccaacgccaacuccgccgucaagaacaacaacaacgaggagcccuccgacaagcacaucaaggaguaccucaacaagauccagaacucccucuccaccgaguggucccccugcuccgucaccugcggcaacggcauccagguccgcaucaagcccggcuccgccaacaagcccaaggacgagcucgacuacgccaacgacaucgagaagaagaucugcaagauggagaagugcuccuccgucuucaacgucgucaacuccucccccgucaccaacauggagaacaucaccuccggcuuccucggcccccuccucguccuccaggccggcuucuuccuccucacccgcauccucaccaucccccagucccucgacuccugguggaccucccucaacuuccucggcggcucccccgucugccucggccagaacucccagucccccaccuccaaccacucccccaccuccugcccccccaucugccccggcuaccgcuggaugugccuccgccgcuucaucaucuuccucuucauccuccuccucugccucaucuuccuccucguccuccucgacuaccagggcaugcuccccgucugcccccucauccccggcuccaccaccaccaacaccggccccugcaagaccugcaccacccccgcccagggcaacuccauguuccccuccugcugcugcaccaagcccaccgacggcaacugcaccugcauccccauccccuccuccugggccuucgccaaguaccucugggagugggccuccguccgcuucuccuggcucucccuccucguccccuucguccagugguucgucggccucucccccaccgucuggcucuccgccaucuggaugaugugguacuggggccccucccucuacuccaucgucucccccuucaucccccuccuccccaucuucuucugccucugggucuacaucugaggacuaguuauaagacugacuagcccgaugggccucccaacgggcccuccuccccuccuugcaccgagauuaauaaaaaaaaaaaaaaaaaaaaaaaaaaaaaaaaaaaaaaaaaaaaaaaaaaaaaaaaaaaaaaaaugcaucccccccccccccccccccccccccccccccaaaggcucuuuucagagccaccagaauu

SEQ ID NO: 9094 - RNA, 1879 nt, Artificial Sequence
  mRNA Design i-3 (A64-N5-C30-hSL-N5) comprising derived and/or modified sequence from Pf(3D7)__XP_001351122.1__HsALB_Pf-CSP(19-384)_L(SGG)_Ferritin (opt2)
aggagaaagcuuaccaugaagugggucaccuucaucucccuccucuuccucuucuccuccgccuacucccucuuccaggaguaccagugcuacggcuccuccuccaacacccgcguccucaacgagcucaacuacgacaacgccggcaccaaccucuacaacgagcucgagaugaacuacuacggcaagcaggagaacugguacucccucaagaagaacucccgcucccucggcgagaacgacgacggcaacaacgaggacaacgagaagcuccgcaagcccaagcacaagaagcucaagcagcccgccgacggcaaccccgaccccaacgccaaccccaacgucgaccccaacgccaaccccaacgucgaccccaacgccaaccccaacgucgaccccaacgccaaccccaacgccaaccccaacgccaaccccaacgccaaccccaacgccaaccccaacgccaaccccaacgccaaccccaacgccaaccccaacgccaaccccaacgccaaccccaacgccaaccccaacgccaaccccaacgccaaccccaacgccaaccccaacgccaaccccaacgccaaccccaacgccaaccccaacgucgaccccaacgccaaccccaacgccaaccccaacgccaaccccaacgccaaccccaacgccaaccccaacgccaaccccaacgccaaccccaacgccaaccccaacgccaaccccaacgccaaccccaacgccaaccccaacgccaaccccaacgccaaccccaacgccaaccccaacgccaaccccaacgccaaccccaacgccaaccccaacgccaaccccaacaagaacaaccagggcaacggccagggccacaacaugcccaacgaccccaaccgcaacgucgacgagaacgccaacgccaacuccgccgucaagaacaacaacaacgaggagcccuccgacaagcacaucaaggaguaccucaacaagauccagaacucccucuccaccgaguggucccccugcuccgucaccugcggcaacggcauccagguccgcaucaagcccggcuccgccaacaagcccaaggacgagcucgacuacgccaacgacaucgagaagaagaucugcaagauggagaagugcuccuccgucuucaacgucgucaacuccuccuccggcggccucuccaaggacaucaucaagcuccucaacgagcaggucaacaaggagaugaacuccuccaaccucuacauguccauguccuccuggugcuacacccacucccucgacggcgccggccucuuccucuucgaccacgccgccgaggaguacgagcacgccaagaagcucaucaucuuccucaacgagaacaacguccccguccagcucaccuccaucuccgcccccgagcacaaguucgagggccucacccagaucuuccagaaggccuacgagcacgagcagcacaucuccgaguccaucaacaacaucgucgaccacgccaucaaguccaaggaccacgccaccuucaacuuccuccagugguacgucgccgagcagcacgaggaggagguccucuucaaggacauccucgacaagaucgagcucaucggcaacgagaaccacggccucuaccucgccgaccaguacgucaagggcaucgccaagucccgcaaguccugaggacuaguuauaagacugacuagcccgaugggccucccaacgggcccuccuccccuccuugcaccgagauuaauaaaaaaaaaaaaaaaaaaaaaaaaaaaaaaaaaaaaaaaaaaaaaaaaaaaaaaaaaaaaaaaaugcaucccccccccccccccccccccccccccccccaaaggcucuuuucagagccaccagaauu

SEQ ID NO: 9095 - RNA, 1840 nt, Artificial Sequence
  mRNA Design i-3 (A64-N5-C30-hSL-N5) comprising derived and/or modified sequence from Pf(3D7)__XP_001351122.1__HsALB_Pf-CSP(93-384)_L(PVTN)_HBsAg (opt2)
aggagaaagcuuaccaugaagugggucaccuucaucucccuccucuuccucuucuccuccgccuacuccaagcucaagcagcccgccgacggcaaccccgaccccaacgccaaccccaacgucgaccccaacgccaaccccaacgucgaccccaacgccaaccccaacgucgaccccaacgccaaccccaacgccaaccccaacgccaaccccaacgccaaccccaacgccaaccccaacgccaaccccaacgccaaccccaacgccaaccccaacgccaaccccaacgccaaccccaacgccaaccccaacgccaaccccaacgccaaccccaacgccaaccccaacgccaaccccaacgccaaccccaacgccaaccccaacgucgaccccaacgccaaccccaacgccaaccccaacgccaaccccaacgccaaccccaacgccaaccccaacgccaaccccaacgccaaccccaacgccaaccccaacgccaaccccaacgccaaccccaacgccaaccccaacgccaaccccaacgccaaccccaacgccaaccccaacgccaaccccaacgccaaccccaacgccaaccccaacgccaaccccaacaagaacaaccagggcaacggccagggccacaacaugcccaacgaccccaaccgcaacgucgacgagaacgccaacgccaacuccgccgucaagaacaacaacaacgaggagcccuccgacaagcacaucaaggaguaccucaacaagauccagaacucccucuccaccgaguggucccccugcuccgucaccugcggcaacggcauccagguccgcaucaagcccggcuccgccaacaagcccaaggacgagcucgacuacgccaacgacaucgagaagaagaucugcaagauggagaagugcuccuccgucuucaacgucgucaacuccucccccgucaccaacauggagaacaucaccuccggcuuccucggcccccuccucguccuccaggccggcuucuuccuccucacccgcauccucaccaucccccagucccucgacuccugguggaccucccucaacuuccucggcggcucccccgucugccucggccagaacucccagucccccaccuccaaccacucccccaccuccugcccccccaucugccccggcuaccgcuggaugugccuccgccgcuucaucaucuuccucuucauccuccuccucugccucaucuuccuccucguccuccucgacuaccagggcaugcuccccgucugcccccucauccccggcuccaccaccaccaacaccggccccugcaagaccugcaccacccccgcccagggcaacuccauguuccccuccugcugcugcaccaagcccaccgacggcaacugcaccugcauccccauccccuccuccugggccuucgccaaguaccucugggagugggccuccguccgcuucuccuggcucucccuccucguccccuucguccagugguucgucggccucucccccaccgucuggcucuccgccaucuggaugaugugguacuggggccccucccucuacuccaucgucucccccuucaucccccuccuccccaucuucuucugccucugggucuacaucugaggacuaguuauaagacugacuagcccgaugggccucccaacgggcccuccuccccuccuugcaccgagauuaauaaaaaaaaaaaaaaaaaaaaaaaaaaaaaaaaaaaaaaaaaaaaaaaaaaaaaaaaaaaaaaaaugcaucccccccccccccccccccccccccccccccaaaggcucuuuucagagccaccagaauu

SEQ ID NO: 9096 - RNA, 1501 nt, Artificial Sequence; identical to SEQ ID NO: 1894
  mRNA Design i-3 (A64-N5-C30-hSL-N5) comprising derived and/or modified sequence from Pf(3D7)__XP_001351122.1__HsALB_Pf-CSP(199-377)_L(PVTN)_HBsAg (opt2)

SEQ ID NO: 9097 - RNA, 1198 nt, Artificial Sequence
  mRNA Design i-3 (A64-N5-C30-hSL-N5) comprising derived and/or modified sequence from Pf(3D7)__XP_001351122.1__HsALB_Pf-CSP(19-272)_L(AAY)_Pf-CSP(346-3 75)_L(AAY)_Pf-CSP(310-327) (opt2)
aggagaaagcuuaccaugaagugggucaccuucaucucccuccucuuccucuucuccuccgccuacucccucuuccaggaguaccagugcuacggcuccuccuccaacacccgcguccucaacgagcucaacuacgacaacgccggcaccaaccucuacaacgagcucgagaugaacuacuacggcaagcaggagaacugguacucccucaagaagaacucccgcucccucggcgagaacgacgacggcaacaacgaggacaacgagaagcuccgcaagcccaagcacaagaagcucaagcagcccgccgacggcaaccccgaccccaacgccaaccccaacgucgaccccaacgccaaccccaacgucgaccccaacgccaaccccaacgucgaccccaacgccaaccccaacgccaaccccaacgccaaccccaacgccaaccccaacgccaaccccaacgccaaccccaacgccaaccccaacgccaaccccaacgccaaccccaacgccaaccccaacgccaaccccaacgccaaccccaacgccaaccccaacgccaaccccaacgccaaccccaacgccaaccccaacgccaaccccaacgucgaccccaacgccaaccccaacgccaaccccaacgccaaccccaacgccaaccccaacgccaaccccaacgccaaccccaacgccaaccccaacgccaaccccaacgccaaccccaacgccaaccccaacgccaaccccaacgccaaccccaacgccaaccccaacgccaaccccaacgccaaccccaacgccaaccccaacgccaaccccaacgccaaccccgccgccuacaucaagcccggcuccgccaacaagcccaaggacgagcucgacuacgccaacgacaucgagaagaagaucugcaagauggagaagugcuccgccgccuacgagcccuccgacaagcacaucaaggaguaccucaacaagauccagaacucccucugaggacuaguuauaagacugacuagcccgaugggccucccaacgggcccuccuccccuccuugcaccgagauuaauaaaaaaaaaaaaaaaaaaaaaaaaaaaaaaaaaaaaaaaaaaaaaaaaaaaaaaaaaaaaaaaaugcaucccccccccccccccccccccccccccccccaaaggcucuuuucagagccaccagaauu

SEQ ID NO: 9098 - RNA, 1246 nt, Artificial Sequence
  mRNA Design i-3 (A64-N5-C30-hSL-N5) comprising derived and/or modified sequence from Pf(3D7)__XP_001351122.1__HsALB_Pf-CSP(19-272)_L(AAY)_Pf-CSP(346-3 75)_L(AAY)_Pf-CSP(310-327)_L(AAY)_PADRE (opt2)
aggagaaagcuuaccaugaagugggucaccuucaucucccuccucuuccucuucuccuccgccuacucccucuuccaggaguaccagugcuacggcuccuccuccaacacccgcguccucaacgagcucaacuacgacaacgccggcaccaaccucuacaacgagcucgagaugaacuacuacggcaagcaggagaacugguacucccucaagaagaacucccgcucccucggcgagaacgacgacggcaacaacgaggacaacgagaagcuccgcaagcccaagcacaagaagcucaagcagcccgccgacggcaaccccgaccccaacgccaaccccaacgucgaccccaacgccaaccccaacgucgaccccaacgccaaccccaacgucgaccccaacgccaaccccaacgccaaccccaacgccaaccccaacgccaaccccaacgccaaccccaacgccaaccccaacgccaaccccaacgccaaccccaacgccaaccccaacgccaaccccaacgccaaccccaacgccaaccccaacgccaaccccaacgccaaccccaacgccaaccccaacgccaaccccaacgccaaccccaacgucgaccccaacgccaaccccaacgccaaccccaacgccaaccccaacgccaaccccaacgccaaccccaacgccaaccccaacgccaaccccaacgccaaccccaacgccaaccccaacgccaaccccaacgccaaccccaacgccaaccccaacgccaaccccaacgccaaccccaacgccaaccccaacgccaaccccaacgccaaccccaacgccaaccccgccgccuacaucaagcccggcuccgccaacaagcccaaggacgagcucgacuacgccaacgacaucgagaagaagaucugcaagauggagaagugcuccgccgccuacgagcccuccgacaagcacaucaaggaguaccucaacaagauccagaacucccucgccgccuacgccaaguucgucgccgccuggacccucaaggccgccgccugaggacuaguuauaagacugacuagcccgaugggccucccaacgggcccuccuccccuccuugcaccgagauuaauaaaaaaaaaaaaaaaaaaaaaaaaaaaaaaaaaaaaaaaaaaaaaaaaaaaaaaaaaaaaaaaaugcaucccccccccccccccccccccccccccccccaaaggcucuuuucagagccaccagaauu

SEQ ID NO: 9099 - RNA, 1246 nt, Artificial Sequence
  mRNA Design i-3 (A64-N5-C30-hSL-N5) comprising derived and/or modified sequence from Pf(3D7)__XP_001351122.1__HsALB_Pf-CSP(19-272)_L(AAY)_Pf-CSP(310-3 27)_L(AAY)_Pf-CSP(346-375)_L(AAY)_PADRE (opt2)
aggagaaagcuuaccaugaagugggucaccuucaucucccuccucuuccucuucuccuccgccuacucccucuuccaggaguaccagugcuacggcuccuccuccaacacccgcguccucaacgagcucaacuacgacaacgccggcaccaaccucuacaacgagcucgagaugaacuacuacggcaagcaggagaacugguacucccucaagaagaacucccgcucccucggcgagaacgacgacggcaacaacgaggacaacgagaagcuccgcaagcccaagcacaagaagcucaagcagcccgccgacggcaaccccgaccccaacgccaaccccaacgucgaccccaacgccaaccccaacgucgaccccaacgccaaccccaacgucgaccccaacgccaaccccaacgccaaccccaacgccaaccccaacgccaaccccaacgccaaccccaacgccaaccccaacgccaaccccaacgccaaccccaacgccaaccccaacgccaaccccaacgccaaccccaacgccaaccccaacgccaaccccaacgccaaccccaacgccaaccccaacgccaaccccaacgccaaccccaacgucgaccccaacgccaaccccaacgccaaccccaacgccaaccccaacgccaaccccaacgccaaccccaacgccaaccccaacgccaaccccaacgccaaccccaacgccaaccccaacgccaaccccaacgccaaccccaacgccaaccccaacgccaaccccaacgccaaccccaacgccaaccccaacgccaaccccaacgccaaccccaacgccaaccccgccgccuacgagcccuccgacaagcacaucaaggaguaccucaacaagauccagaacucccucgccgccuacaucaagcccggcuccgccaacaagcccaaggacgagcucgacuacgccaacgacaucgagaagaagaucugcaagauggagaagugcuccgccgccuacgccaaguucgucgccgccuggacccucaaggccgccgccugaggacuaguuauaagacugacuagcccgaugggccucccaacgggcccuccuccccuccuugcaccgagauuaauaaaaaaaaaaaaaaaaaaaaaaaaaaaaaaaaaaaaaaaaaaaaaaaaaaaaaaaaaaaaaaaaugcaucccccccccccccccccccccccccccccccaaaggcucuuuucagagccaccagaauu

SEQ ID NO: 9100 - RNA, 1300 nt, Artificial Sequence
  mRNA Design i-3 (A64-N5-C30-hSL-N5) comprising derived and/or modified sequence from Pf(3D7)__XP_001351122.1__HsALB_Pf-CSP(19-272)_L(AAY)_Pf-CSP(310-3 27)_L(AAY)_Pf-CSP(346-375)_L(AAY)_PADRE_L(AAY)_P2 (opt2)
aggagaaagcuuaccaugaagugggucaccuucaucucccuccucuuccucuucuccuccgccuacucccucuuccaggaguaccagugcuacggcuccuccuccaacacccgcguccucaacgagcucaacuacgacaacgccggcaccaaccucuacaacgagcucgagaugaacuacuacggcaagcaggagaacugguacucccucaagaagaacucccgcucccucggcgagaacgacgacggcaacaacgaggacaacgagaagcuccgcaagcccaagcacaagaagcucaagcagcccgccgacggcaaccccgaccccaacgccaaccccaacgucgaccccaacgccaaccccaacgucgaccccaacgccaaccccaacgucgaccccaacgccaaccccaacgccaaccccaacgccaaccccaacgccaaccccaacgccaaccccaacgccaaccccaacgccaaccccaacgccaaccccaacgccaaccccaacgccaaccccaacgccaaccccaacgccaaccccaacgccaaccccaacgccaaccccaacgccaaccccaacgccaaccccaacgccaaccccaacgucgaccccaacgccaaccccaacgccaaccccaacgccaaccccaacgccaaccccaacgccaaccccaacgccaaccccaacgccaaccccaacgccaaccccaacgccaaccccaacgccaaccccaacgccaaccccaacgccaaccccaacgccaaccccaacgccaaccccaacgccaaccccaacgccaaccccaacgccaaccccaacgccaaccccgccgccuacgagcccuccgacaagcacaucaaggaguaccucaacaagauccagaacucccucgccgccuacaucaagcccggcuccgccaacaagcccaaggacgagcucgacuacgccaacgacaucgagaagaagaucugcaagauggagaagugcuccgccgccuacgccaaguucgucgccgccuggacccucaaggccgccgccgccgccuaccaguacaucaaggccaacuccaaguucaucggcaucaccgagcucugaggacuaguuauaagacugacuagcccgaugggccucccaacgggcccuccuccccuccuugcaccgagauuaauaaaaaaaaaaaaaaaaaaaaaaaaaaaaaaaaaaaaaaaaaaaaaaaaaaaaaaaaaaaaaaaaugcaucccccccccccccccccccccccccccccccaaaggcucuuuucagagccaccagaauu

SEQ ID NO: 9101 - RNA, 1264 nt, Artificial Sequence
  mRNA Design i-3 (A64-N5-C30-hSL-N5) comprising derived and/or modified sequence from Pf(3D7)__XP_001351122.1__HsALB_Pf-CSP(19-272)_L(AAY)_Pf-CSP(310-3 27)_Linker (AAY)_Pf-CSP(346-397) (opt2)
aggagaaagcuuaccaugaagugggucaccuucaucucccuccucuuccucuucuccuccgccuacucccucuuccaggaguaccagugcuacggcuccuccuccaacacccgcguccucaacgagcucaacuacgacaacgccggcaccaaccucuacaacgagcucgagaugaacuacuacggcaagcaggagaacugguacucccucaagaagaacucccgcucccucggcgagaacgacgacggcaacaacgaggacaacgagaagcuccgcaagcccaagcacaagaagcucaagcagcccgccgacggcaaccccgaccccaacgccaaccccaacgucgaccccaacgccaaccccaacgucgaccccaacgccaaccccaacgucgaccccaacgccaaccccaacgccaaccccaacgccaaccccaacgccaaccccaacgccaaccccaacgccaaccccaacgccaaccccaacgccaaccccaacgccaaccccaacgccaaccccaacgccaaccccaacgccaaccccaacgccaaccccaacgccaaccccaacgccaaccccaacgccaaccccaacgccaaccccaacgucgaccccaacgccaaccccaacgccaaccccaacgccaaccccaacgccaaccccaacgccaaccccaacgccaaccccaacgccaaccccaacgccaaccccaacgccaaccccaacgccaaccccaacgccaaccccaacgccaaccccaacgccaaccccaacgccaaccccaacgccaaccccaacgccaaccccaacgccaaccccaacgccaaccccgccgccuacgagcccuccgacaagcacaucaaggaguaccucaacaagauccagaacucccucgccgccuacaucaagcccggcuccgccaacaagcccaaggacgagcucgacuacgccaacgacaucgagaagaagaucugcaagauggagaagugcuccuccgucuucaacgucgucaacuccuccaucggccucaucaugguccucuccuuccucuuccucaacugaggacuaguuauaagacugacuagcccgaugggccucccaacgggcccuccuccccuccuugcaccgagauuaauaaaaaaaaaaaaaaaaaaaaaaaaaaaaaaaaaaaaaaaaaaaaaaaaaaaaaaaaaaaaaaaaugcaucccccccccccccccccccccccccccccccaaaggcucuuuucagagccaccagaauu

SEQ ID NO: 9102 - RNA, 1864 nt, Artificial Sequence
  mRNA Design i-3 (A64-N5-C30-hSL-N5) comprising derived and/or modified sequence from Pf(3D7)__XP_001351122.1__LumSynt_L(GGS4-GGG)_Pf-CSP(19-397) (opt3)
aggagaaagcuuaccaugcagaucuacgagggcaagcugaccgccgaagggcucagauucggaauuguggcuagcagguuuaaccacgcacuugucgaccggcugguugagggugccauagaugcgaucgugcgccauggcgggcgagaagaggacauuacauugguacgugugcccggauccugggaaaucccugucgcugccggcgaguuagcaagaaaagaggauauugacgccgugaucgcuauagguguucugaucaggggagcaacuccacacuucgauuauauugccucugaagugucaaaggggcuagcugaccucagucuggagcuucggaaaccgaucacguuuggcgucauuaccgccgauacacuggaacaagcgaucgagcgcgcaggcacuaagcaugggaauaaaggaugggaggccgcuuugagcgccauagaaauggcaaaccucuucaagucccugagagguggcucugggggaucgggcgguucagggggaagcggcggcgggcuguuucaggaguaccagugcuauggaaguuccucuaauaccagggugcucaacgaauuaaauuacgacaacgcugguacaaaucuguauaacgagcuugaaaugaauuacuauggcaagcaggagaacugguacagcuugaaaaagaacucccggucacugggggagaaugaugacggaaauaacgaagauaaugagaaacuacgcaagcccaaacacaagaagcucaaacaaccugccgacggcaacccagaucccaacgcgaauccuaacguagacccaaaugccaaccccaauguugacccuaacgcaaauccaaacguggauccgaaugcuaaccccaaugccaacccuaaugcuaacccaaaugccaaccccaacgcaaauccuaacgccaauccaaacgcuaaucccaacgcgaauccgaacgcaaauccuaacgccaaucccaacgcuaauccaaacgccaauccuaacgcaaaccccaaugccaacccaaaugcuaaccccaaugccaacccuaaugcaaacccaaaugucgacccgaacgcgaaucccaacgcuaauccuaacgccaauccaaacgcaaaccccaaugccaacccuaaugcuaacccaaaugccaaccccaaugcaaacccgaaugcuaacccuaaugccaacccaaaugcgaaccccaaugccaacccuaaugcuaaccccaacgcaaauccaaacgccaauccuaacgcuaaucccaacgccaauccaaacgcaaauccgaacaagaauaaccaggguaaugggcagggccauaacaugccuaaugaucccaaccgaaacguggacgaaaaugcgaacgccaauagugcugugaaaaacaauaacaaugaggaaccaagcgauaagcacauuaaagaguaccugaacaagauccaaaauucucuuuccaccgaguggucacccugcagcgucacuugcggaaacggcauucagguuagaaucaaaccugggagugccaauaagccaaaggacgaacuggauuaugcaaacgacaucgagaaaaagauuuguaaaauggaaaaguguucuuccguguucaauguagugaacagcucgauaggauugaucaugguccucucuuuucuguucuuaaauugaggacuaguuauaagacugacuagcccgaugggccucccaacgggcccuccuccccuccuugcaccgagauuaauaaaaaaaaaaaaaaaaaaaaaaaaaaaaaaaaaaaaaaaaaaaaaaaaaaaaaaaaaaaaaaaaugcaucccccccccccccccccccccccccccccccaaaggcucuuuucagagccaccagaauu

SEQ ID NO: 9103 - RNA, 1726 nt, Artificial Sequence
  mRNA Design i-3 (A64-N5-C30-hSL-N5) comprising derived and/or modified sequence from Pf(3D7)__XP_001351122.1__HsALB_Pf-CSP(19-272)_L(PVTN)_HBsAg (opt3)
aggagaaagcuuaccaugaagugggugaccuucaucagccugcucuuucuuuucuccucugccuacucacuguuucaggaguaucaaugcuacggcaguagcuccaacacaagagucuugaaugaauuaaacuaugacaaugcugggacuaaccuguacaaugagcuagaaaugaacuauuacggaaaacaggagaauugguauucucucaagaaaaacucgaggucacugggugaaaaugaugacggcaacaaugaggauaacgagaaacuucggaagcccaagcacaagaaacugaagcagccugcagacgggaauccagauccgaacgccaaucccaacguugacccuaacgcgaauccaaacguggaucccaaugcuaacccuaauguagacccaaacgccaaucccaacgcaaauccuaacgccaauccaaacgcuaauccgaacgcaaaucccaacgccaacccuaaugcuaacccaaaugccaaccccaaugcgaacccuaaugcaaacccaaaugccaaccccaaugcuaacccgaaugccaacccuaaugcaaaccccaacgcuaauccaaacgccaauccuaacgcgaaucccaacguggauccaaaugccaaccccaaugcaaacccuaaugcuaacccaaaugccaacccgaaugcuaaccccaacgccaauccuaacgcaaauccaaacgccaaucccaacgcuaauccuaacgcgaauccaaacgcaaaucccaacgccaauccgaacgcuaauccuaacgccaauccaaacgcaaaccccaaugccaacccuaaugcuaaccccaaugccaacccaccugucacgaauauggaaaacauuaccagcggauucuugggcccccuccuggugcugcaggcaggguuuuuccucuuaacacgcauacugacuaucccacaaagucuugacuccugguggaccucuuugaauuuucuggguggaagcccgguuugucuaggccagaacucccagucaccuacaaguaaucauagccccaccucuugcccacccauuuguccuggcuaccgauggaugugccuccguagauucaucauuuuucuguucauccuucuguugugucucauauuucuguuagugcugcucgauuaccaggggaugcuuccagucugcccccugaucccuggauccacuacaaccaacacggguccguguaaaacuugcaccacaccagcgcaaggcaauucaauguuccccagcuguugcuguacuaagccuaccgacgggaacugcacaugcauuccaauccccaguucuugggcuuuugccaaauauuugugggagugggcauccgugagguucagcuggcuaucgcugcucguaccuuucguucagugguuugugggacugucuccgaccgucuggcuuuccgccauuuggaugaugugguacuggggccccucacuguauaguaucgugagcccauucauaccuuugcuccccaucuuuuucugucuguggguguacauuugaggacuaguuauaagacugacuagcccgaugggccucccaacgggcccuccuccccuccuugcaccgagauuaauaaaaaaaaaaaaaaaaaaaaaaaaaaaaaaaaaaaaaaaaaaaaaaaaaaaaaaaaaaaaaaaaugcaucccccccccccccccccccccccccccccccaaaggcucuuuucagagccaccagaauu

SEQ ID NO: 9104 - RNA, 1843 nt, Artificial Sequence
  mRNA Design i-3 (A64-N5-C30-hSL-N5) comprising derived and/or modified sequence from Pf(3D7)__XP_001351122.1__HsALB_Pf-CSP(19-272)_L(AAY)_Pf-CSP(346-3 65)_L(AAY)_PADRE_L(PVTN)_HBsAg (opt3)
aggagaaagcuuaccaugaagugggugaccuucaucagccugcucuuucuuuucuccucugccuacucacuguuucaggaguaucaaugcuacggcaguagcuccaacacaagagucuugaaugaauuaaacuaugacaaugcugggacuaaccuguacaaugagcuagaaaugaacuauuacggaaaacaggagaauugguauucucucaagaaaaacucgaggucacugggugaaaaugaugacggcaacaaugaggauaacgagaaacuucggaagcccaagcacaagaaacugaagcagccugcagacgggaauccagauccgaacgccaaucccaacguugacccuaacgcgaauccaaacguggaucccaaugcuaacccuaauguagacccaaacgccaaucccaacgcaaauccuaacgccaauccaaacgcuaauccgaacgcaaaucccaacgccaacccuaaugcuaacccaaaugccaaccccaaugcgaacccuaaugcaaacccaaaugccaaccccaaugcuaacccgaaugccaacccuaaugcaaaccccaacgcuaauccaaacgccaauccuaacgcgaaucccaacguggauccaaaugccaaccccaaugcaaacccuaaugcuaacccaaaugccaacccgaaugcuaaccccaacgccaauccuaacgcaaauccaaacgccaaucccaacgcuaauccuaacgcgaauccaaacgcaaaucccaacgccaauccgaacgcuaauccuaacgccaauccaaacgcaaaccccaaugccaacccuaaugcuaaccccaaugccaacccagcagcguacauuaaaccuggaagcgcuaauaagcccaaagacgaauuggauuacgccaacgacauagaggcagccuaugcuaaguucgucgccgcauggacgcucaaggcugccgcgccagugaccaauauggaaaacaucacaaguggcuuucuggguccgcugcucguuuuacaggccggguucuuucugcuuacucgcauuuugaccaucccucaaucccuggauucuugguggacaagccuaaauuuccucggaggcucccccgugugucugggccagaacucacagaguccaaccagcaaucauucucccacuuccugcccuccaauuugucccggguaccgauggaugugccuucguagauuuaucauauuccuguuuaucuugcuccuguguuuaauuuuccugcucguccuucuggacuaucagggaauguugccugugugcccgcuaaucccagguucaacaaccacgaacacuggccccuguaaaaccugcacaacuccugcucaagggaauagcauguuuccaaguuguugcuguaccaagcccacagacggaaacuguaccugcauuccuaucccgucuuccugggcauucgccaaauaccugugggagugggcuagcguaagguucucguggcucucucugcuuguucccuuugugcagugguucgucggccuguccccaacggugugguugucagccauauggaugaugugguauugggguccuagucucuacagcauugugucccccuuuaucccacuguuaccuauuuucuuuugccugugggucuauaucugaggacuaguuauaagacugacuagcccgaugggccucccaacgggcccuccuccccuccuugcaccgagauuaauaaaaaaaaaaaaaaaaaaaaaaaaaaaaaaaaaaaaaaaaaaaaaaaaaaaaaaaaaaaaaaaaugcaucccccccccccccccccccccccccccccccaaaggcucuuuucagagccaccagaauu

SEQ ID NO: 9105 - RNA, 2062 nt, Artificial Sequence
  mRNA Design i-3 (A64-N5-C30-hSL-N5) comprising derived and/or modified sequence from Pf(3D7)__XP_001351122.1__HsALB_Pf-CSP(19-384)_L(PVTN)_HBsAg (opt3)
aggagaaagcuuaccaugaagugggugaccuucaucagccugcucuuucuuuucuccucugccuacucacuguuucaggaguaucaaugcuacggcaguagcuccaacacaagagucuugaaugaauuaaacuaugacaaugcugggacuaaccuguacaaugagcuagaaaugaacuauuacggaaaacaggagaauugguauucucucaagaaaaacucgaggucacugggugaaaaugaugacggcaacaaugaggauaacgagaaacuucggaagcccaagcacaagaaacugaagcagccugcagacgggaauccagauccgaacgccaaucccaacguugacccuaacgcgaauccaaacguggaucccaaugcuaacccuaauguagacccaaacgccaaucccaacgcaaauccuaacgccaauccaaacgcuaauccgaacgcaaaucccaacgccaacccuaaugcuaacccaaaugccaaccccaaugcgaacccuaaugcaaacccaaaugccaaccccaaugcuaacccgaaugccaacccuaaugcaaaccccaacgcuaauccaaacgccaauccuaacgcgaaucccaacguggauccaaaugccaaccccaaugcaaacccuaaugcuaacccaaaugccaacccgaaugcuaaccccaacgccaauccuaacgcaaauccaaacgccaaucccaacgcuaauccuaacgcgaauccaaacgcaaaucccaacgccaauccgaacgcuaauccuaacgccaauccaaacgcaaaccccaaugccaacccuaaugcuaaccccaaugccaacccaaauaaaaacaaucagggaaacggccaaggucauaauaugccuaacgaccccaaucgcaacgucgaugaaaaugcaaacgcgaacagcgcugugaagaauaacaauaacgaggaaccaagugacaaacacauuaaggaguacuugaauaagauacagaacucccucucuacggaguggagcccguguuccguuaccugcgggaauggaauccaggugcgaauuaaaccuggcucagccaacaagcccaaagaugaacuggacuacgcaaaugacaucgagaagaaaauuuguaagauggaaaaaugcaguagcgucuucaacgugguaaauucuuccccaguuacaaacauggagaauaucacuucaggcuuucuggggccccucuuagugcugcaggccggauucuuucuuuugacccguauacugacaaucccucaaagccuagauaguugguggaccucucucaacuuccuggguggcuccccagucugucuugggcagaauagccagucgcccacuucuaaccauuccccuacaucaugcccgccaauuugucccggauauagauggaugugccugaggcgguuuaucauuuucuuguuuauccuccuguuaugucugauauuccuccuugugcuguuggacuaccagggcaugcuaccugugugcccacugauucccgguaguaccacgacuaacaccgggccuuguaagacaugcacuaccccggcucaaggaaauagcauguuucccuccugcuguugcacaaagccaaccgauggcaacuguacgugcaucccuauucccucuagcugggccuucgcaaaauaucucugggaaugggcuucaguccgcuucaguuggcugucccuucugguuccauuugugcagugguucguaggcuugagcccuacuguguggcucucugccaucuggaugaugugguacugggggcccucacuguauaguaucgucagcccauuuauuccguuacugccuauauucuuuugucuauggguguacaucugaggacuaguuauaagacugacuagcccgaugggccucccaacgggcccuccuccccuccuugcaccgagauuaauaaaaaaaaaaaaaaaaaaaaaaaaaaaaaaaaaaaaaaaaaaaaaaaaaaaaaaaaaaaaaaaaugcaucccccccccccccccccccccccccccccccaaaggcucuuuucagagccaccagaauu

SEQ ID NO: 9106 - RNA, 1879 nt, Artificial Sequence
  mRNA Design i-3 (A64-N5-C30-hSL-N5) comprising derived and/or modified sequence from Pf(3D7)__XP_001351122.1__HsALB_Pf-CSP(19-384)_L(SGG)_Ferritin (opt3)
aggagaaagcuuaccaugaagugggugaccuucaucagccugcucuuucuuuucuccucugccuacucacuguuucaggaguaucaaugcuacggcaguagcuccaacacaagagucuugaaugaauuaaacuaugacaaugcugggacuaaccuguacaaugagcuagaaaugaacuauuacggaaaacaggagaauugguauucucucaagaaaaacucgaggucacugggugaaaaugaugacggcaacaaugaggauaacgagaaacuucggaagcccaagcacaagaaacugaagcagccugcagacgggaauccagauccgaacgccaaucccaacguugacccuaacgcgaauccaaacguggaucccaaugcuaacccuaauguagacccaaacgccaaucccaacgcaaauccuaacgccaauccaaacgcuaauccgaacgcaaaucccaacgccaacccuaaugcuaacccaaaugccaaccccaaugcgaacccuaaugcaaacccaaaugccaaccccaaugcuaacccgaaugccaacccuaaugcaaaccccaacgcuaauccaaacgccaauccuaacgcgaaucccaacguggauccaaaugccaaccccaaugcaaacccuaaugcuaacccaaaugccaacccgaaugcuaaccccaacgccaauccuaacgcaaauccaaacgccaaucccaacgcuaauccuaacgcgaauccaaacgcaaaucccaacgccaauccgaacgcuaauccuaacgccaauccaaacgcaaaccccaaugccaacccuaaugcuaaccccaaugccaacccaaauaaaaacaaucagggaaacggccaaggucauaauaugccuaacgaccccaaucgcaacgucgaugaaaaugcaaacgcgaacagcgcugugaagaauaacaauaacgaggaaccaagugacaaacacauuaaggaguacuugaauaagauacagaacucccucucuacggaguggagcccguguuccguuaccugcgggaauggaauccaggugcgaauuaaaccuggcucagccaacaagcccaaagaugaacuggacuacgcaaaugacaucgagaagaaaauuuguaagauggaaaaaugcaguagcgucuucaacgugguaaauucuuccucaggcgggcugagcaaggauaucauaaagcucuuaaacgagcagguuaauaaagaaaugaacaguucuaaucuguauauguccaugagcucgugguguuacacacauucucuugacggagccgguuuguuucuguucgaucacgcugccgaggaguaugaacaugcaaagaaacuaaucauuuuucucaacgagaacaaugugccaguccaacugacuuccaucucagcucccgaacacaaguucgagggccuuacccagauuuuucagaaagccuacgaacacgagcagcauaucagugagagcauaaacaauauuguggaccacgcgaucaaguccaaggaucaugccacauucaacuuucugcaaugguauguggcugaacagcacgaggaagaggucuuguucaaagacauucucgauaagaucgaacugaucgggaaugagaaccacggauuauaccuggcagaccaguauguuaaaggcauugccaagucucguaaaagcugaggacuaguuauaagacugacuagcccgaugggccucccaacgggcccuccuccccuccuugcaccgagauuaauaaaaaaaaaaaaaaaaaaaaaaaaaaaaaaaaaaaaaaaaaaaaaaaaaaaaaaaaaaaaaaaaugcaucccccccccccccccccccccccccccccccaaaggcucuuuucagagccaccagaauu

SEQ ID NO: 9107 - RNA, 1840 nt, Artificial Sequence
  mRNA Design i-3 (A64-N5-C30-hSL-N5) comprising derived and/or modified sequence from Pf(3D7)__XP_001351122.1__HsALB_Pf-CSP(93-384)_L(PVTN)_HBsAg (opt3)
aggagaaagcuuaccaugaagugggugaccuucaucagccugcucuuucuuuucuccucugccuacucaaaacugaagcagcccgcugacggcaacccugauccaaaugcaaacccgaaugucgaccccaacgccaauccuaacguugauccaaaugcgaaccccaauguggacccuaacgcuaauccaaacgccaaucccaacgcaaauccuaacgccaacccaaaugcuaacccgaaugcaaaccccaaugccaacccuaaugcuaacccaaaugccaaccccaaugcgaacccuaaugcaaacccaaaugccaaccccaacgcuaauccgaacgccaauccuaacgcaaaucccaacgcuaauccaaacgccaauccuaacguagaucccaaugcgaacccaaaugccaaccccaaugcaaacccuaacgcuaauccaaacgccaauccgaacgcuaaucccaacgccaauccuaacgcaaauccaaacgccaaucccaacgcuaauccuaacgcgaauccaaacgcaaaccccaaugccaacccgaaugcuaacccuaaugccaacccaaaugcaaaccccaaugccaacccuaaugcuaaccccaauaaaaacaaucaagggaacggacagggucacaauaugccaaacgacccuaacagaaauguggaugagaacgccaaugcaaacagugcggucaagaauaacaauaacgaggaacccagcgacaaacauauuaaggaauauuugaauaagauacagaacuccuuaucuacagaguggucgccaugcucagugacuuguggcaaugggauccagguuaggauuaaaccgggaagcgcuaacaagccuaaagaugaacuggacuacgccaaugauaucgagaagaaaauuugcaagauggagaaguguaguuccguguuuaacgucguaaauucuagccccgugacgaacauggaaaacaucaccuccggcuuccuagguccacuccugguucuucaagcaggguuuuuccuguugacacggauacucacuaucccccagucacuggacaguugguggaccagccugaauuuucucggaggcucuccugugugcuuaggccagaacucccagucaccaacaagcaaucacagucccaccucuuguccuccgauuugcccaggguaucgcuggaugugucugcgacguuucaucauuuuucuuuucaucuugcugcuaugccucauauuucugcuuguccuguuggauuaccaaggaaugcuccccguguguccucugauuccagguuccacuacaaccaacacgggccccugcaaaacuuguaccacuccugcccaggggaauagcauguucccgucgugcugcuguacaaagcccaccgacggaaacugcacauguaucccaauuccuucuuccugggcuuuugccaaauauuuaugggagugggcaucagugagauucaguuggcugagccuccuuguccccuucguucagugguuugugggccuguccccaaccguaugguugucugcuaucuggaugaugugguacugggguccuagccuauauucaaucgugagucccuucauuccacugcucccgauauuuuucugccugugggucuacaucugaggacuaguuauaagacugacuagcccgaugggccucccaacgggcccuccuccccuccuugcaccgagauuaauaaaaaaaaaaaaaaaaaaaaaaaaaaaaaaaaaaaaaaaaaaaaaaaaaaaaaaaaaaaaaaaaugcaucccccccccccccccccccccccccccccccaaaggcucuuuucagagccaccagaauu

SEQ ID NO: 9108 - RNA, 1501 nt, Artificial Sequence; identical to SEQ ID NO: 1930
  mRNA Design i-3 (A64-N5-C30-hSL-N5) comprising derived and/or modified sequence from Pf(3D7)__XP_001351122.1__HsALB_Pf-CSP(199-377)_L(PVTN)_HBsAg (opt3)

SEQ ID NO: 9109 - RNA, 1198 nt, Artificial Sequence
  mRNA Design i-3 (A64-N5-C30-hSL-N5) comprising derived and/or modified sequence from Pf(3D7)__XP_001351122.1__HsALB_Pf-CSP(19-272)_L(AAY)_Pf-CSP(346-3 75)_L(AAY)_Pf-CSP(310-327) (opt3)
aggagaaagcuuaccaugaagugggugaccuucaucagccugcucuuucuuuucuccucugccuacucacuguuucaggaguaucaaugcuacggcaguagcuccaacacaagagucuugaaugaauuaaacuaugacaaugcugggacuaaccuguacaaugagcuagaaaugaacuauuacggaaaacaggagaauugguauucucucaagaaaaacucgaggucacugggugaaaaugaugacggcaacaaugaggauaacgagaaacuucggaagcccaagcacaagaaacugaagcagccugcagacgggaauccagauccgaacgccaaucccaacguugacccuaacgcgaauccaaacguggaucccaaugcuaacccuaauguagacccaaacgccaaucccaacgcaaauccuaacgccaauccaaacgcuaauccgaacgcaaaucccaacgccaacccuaaugcuaacccaaaugccaaccccaaugcgaacccuaaugcaaacccaaaugccaaccccaaugcuaacccgaaugccaacccuaaugcaaaccccaacgcuaauccaaacgccaauccuaacgcgaaucccaacguggauccaaaugccaaccccaaugcaaacccuaaugcuaacccaaaugccaacccgaaugcuaaccccaacgccaauccuaacgcaaauccaaacgccaaucccaacgcuaauccuaacgcgaauccaaacgcaaaucccaacgccaauccgaacgcuaauccuaacgccaauccaaacgcaaaccccaaugccaacccuaaugcuaaccccaaugccaacccagcagcguacauuaaaccuggaagcgcuaauaagcccaaagacgaauuggauuacgccaacgacauagagaagaagaucuguaaaauggaaaagugcagugcagccuaugagccauccgauaaacauauuaaggaguaccucaauaaaauccagaacucucugugaggacuaguuauaagacugacuagcccgaugggccucccaacgggcccuccuccccuccuugcaccgagauuaauaaaaaaaaaaaaaaaaaaaaaaaaaaaaaaaaaaaaaaaaaaaaaaaaaaaaaaaaaaaaaaaaugcaucccccccccccccccccccccccccccccccaaaggcucuuuucagagccaccagaauu

SEQ ID NO: 9110 - RNA, 1246 nt, Artificial Sequence
  mRNA Design i-3 (A64-N5-C30-hSL-N5) comprising derived and/or modified sequence from Pf(3D7)__XP_001351122.1__HsALB_Pf-CSP(19-272)_L(AAY)_Pf-CSP(346-3 75)_L(AAY)_Pf-CSP(310-327)_L(AAY)_PADRE (opt3)
aggagaaagcuuaccaugaagugggugaccuucaucagccugcucuuucuuuucuccucugccuacucacuguuucaggaguaucaaugcuacggcaguagcuccaacacaagagucuugaaugaauuaaacuaugacaaugcugggacuaaccuguacaaugagcuagaaaugaacuauuacggaaaacaggagaauugguauucucucaagaaaaacucgaggucacugggugaaaaugaugacggcaacaaugaggauaacgagaaacuucggaagcccaagcacaagaaacugaagcagccugcagacgggaauccagauccgaacgccaaucccaacguugacccuaacgcgaauccaaacguggaucccaaugcuaacccuaauguagacccaaacgccaaucccaacgcaaauccuaacgccaauccaaacgcuaauccgaacgcaaaucccaacgccaacccuaaugcuaacccaaaugccaaccccaaugcgaacccuaaugcaaacccaaaugccaaccccaaugcuaacccgaaugccaacccuaaugcaaaccccaacgcuaauccaaacgccaauccuaacgcgaaucccaacguggauccaaaugccaaccccaaugcaaacccuaaugcuaacccaaaugccaacccgaaugcuaaccccaacgccaauccuaacgcaaauccaaacgccaaucccaacgcuaauccuaacgcgaauccaaacgcaaaucccaacgccaauccgaacgcuaauccuaacgccaauccaaacgcaaaccccaaugccaacccuaaugcuaaccccaaugccaacccagcagcguacauuaaaccuggaagcgcuaauaagcccaaagacgaauuggauuacgccaacgacauagagaagaagaucuguaaaauggaaaagugcagugcagccuaugagccauccgauaaacauauuaaggaguaccucaauaaaauccagaacucucuggcugccuaugcaaaguucgucgcugccuggacgcugaaagcggccgcuugaggacuaguuauaagacugacuagcccgaugggccucccaacgggcccuccuccccuccuugcaccgagauuaauaaaaaaaaaaaaaaaaaaaaaaaaaaaaaaaaaaaaaaaaaaaaaaaaaaaaaaaaaaaaaaaaugcaucccccccccccccccccccccccccccccccaaaggcucuuuucagagccaccagaauu

SEQ ID NO: 9111 - RNA, 1246 nt, Artificial Sequence
  mRNA Design i-3 (A64-N5-C30-hSL-N5) comprising derived and/or modified sequence from Pf(3D7)__XP_001351122.1__HsALB_Pf-CSP(19-272)_L(AAY)_Pf-CSP(310-3 27)_L(AAY)_Pf-CSP(346-375)_L(AAY)_PADRE (opt3)
aggagaaagcuuaccaugaagugggugaccuucaucagccugcucuuucuuuucuccucugccuacucacuguuucaggaguaucaaugcuacggcaguagcuccaacacaagagucuugaaugaauuaaacuaugacaaugcugggacuaaccuguacaaugagcuagaaaugaacuauuacggaaaacaggagaauugguauucucucaagaaaaacucgaggucacugggugaaaaugaugacggcaacaaugaggauaacgagaaacuucggaagcccaagcacaagaaacugaagcagccugcagacgggaauccagauccgaacgccaaucccaacguugacccuaacgcgaauccaaacguggaucccaaugcuaacccuaauguagacccaaacgccaaucccaacgcaaauccuaacgccaauccaaacgcuaauccgaacgcaaaucccaacgccaacccuaaugcuaacccaaaugccaaccccaaugcgaacccuaaugcaaacccaaaugccaaccccaaugcuaacccgaaugccaacccuaaugcaaaccccaacgcuaauccaaacgccaauccuaacgcgaaucccaacguggauccaaaugccaaccccaaugcaaacccuaaugcuaacccaaaugccaacccgaaugcuaaccccaacgccaauccuaacgcaaauccaaacgccaaucccaacgcuaauccuaacgcgaauccaaacgcaaaucccaacgccaauccgaacgcuaauccuaacgccaauccaaacgcaaaccccaaugccaacccuaaugcuaaccccaaugccaacccagcagcguacgaaccuagcgacaaacauauuaaggaguacuugaauaaaauacagaacagucucgcugccuauaucaagcccggauccgcaaauaagccaaaagaugaacuggacuacgccaacgauauugagaagaaaaucuguaagauggagaaaugcucugcugccuaugcaaaguucgucgcugccuggacgcugaaagcggccgcuugaggacuaguuauaagacugacuagcccgaugggccucccaacgggcccuccuccccuccuugcaccgagauuaauaaaaaaaaaaaaaaaaaaaaaaaaaaaaaaaaaaaaaaaaaaaaaaaaaaaaaaaaaaaaaaaaugcaucccccccccccccccccccccccccccccccaaaggcucuuuucagagccaccagaauu

SEQ ID NO: 9112 - RNA, 1300 nt, Artificial Sequence
  mRNA Design i-3 (A64-N5-C30-hSL-N5) comprising derived and/or modified sequence from Pf(3D7)__XP_001351122.1__HsALB_Pf-CSP(19-272)_L(AAY)_Pf-CSP(310-3 27)_L(AAY)_Pf-CSP(346-375)_L(AAY)_PADRE_L(AAY)_P2 (opt3)
aggagaaagcuuaccaugaagugggugaccuucaucagccugcucuuucuuuucuccucugccuacucacuguuucaggaguaucaaugcuacggcaguagcuccaacacaagagucuugaaugaauuaaacuaugacaaugcugggacuaaccuguacaaugagcuagaaaugaacuauuacggaaaacaggagaauugguauucucucaagaaaaacucgaggucacugggugaaaaugaugacggcaacaaugaggauaacgagaaacuucggaagcccaagcacaagaaacugaagcagccugcagacgggaauccagauccgaacgccaaucccaacguugacccuaacgcgaauccaaacguggaucccaaugcuaacccuaauguagacccaaacgccaaucccaacgcaaauccuaacgccaauccaaacgcuaauccgaacgcaaaucccaacgccaacccuaaugcuaacccaaaugccaaccccaaugcgaacccuaaugcaaacccaaaugccaaccccaaugcuaacccgaaugccaacccuaaugcaaaccccaacgcuaauccaaacgccaauccuaacgcgaaucccaacguggauccaaaugccaaccccaaugcaaacccuaaugcuaacccaaaugccaacccgaaugcuaaccccaacgccaauccuaacgcaaauccaaacgccaaucccaacgcuaauccuaacgcgaauccaaacgcaaaucccaacgccaauccgaacgcuaauccuaacgccaauccaaacgcaaaccccaaugccaacccuaaugcuaaccccaaugccaacccagcagcguacgaaccuagcgacaaacauauuaaggaguacuugaauaaaauacagaacagucucgcugccuauaucaagcccggauccgcaaauaagccaaaagaugaacuggacuacgccaacgauauugagaagaaaaucuguaagauggagaaaugcucugcugccuaugcaaaguucgucgcugccuggacgcugaaagcggccgcugcagccuaccaauauauuaaggcuaauagcaaguuuaucggcauaaccgaacucugaggacuaguuauaagacugacuagcccgaugggccucccaacgggcccuccuccccuccuugcaccgagauuaauaaaaaaaaaaaaaaaaaaaaaaaaaaaaaaaaaaaaaaaaaaaaaaaaaaaaaaaaaaaaaaaaugcaucccccccccccccccccccccccccccccccaaaggcucuuuucagagccaccagaauu

SEQ ID NO: 9113 - RNA, 1264 nt, Artificial Sequence
  mRNA Design i-3 (A64-N5-C30-hSL-N5) comprising derived and/or modified sequence from Pf(3D7)__XP_001351122.1__HsALB_Pf-CSP(19-272)_L(AAY)_Pf-CSP(310-3 27)_Linker (AAY)_Pf-CSP(346-397) (opt3)
aggagaaagcuuaccaugaagugggugaccuucaucagccugcucuuucuuuucuccucugccuacucacuguuucaggaguaucaaugcuacggcaguagcuccaacacaagagucuugaaugaauuaaacuaugacaaugcugggacuaaccuguacaaugagcuagaaaugaacuauuacggaaaacaggagaauugguauucucucaagaaaaacucgaggucacugggugaaaaugaugacggcaacaaugaggauaacgagaaguuacggaaacccaagcacaagaaacugaagcagccugcagacgggaauccagauccgaacgccaaucccaacguugacccuaacgcgaauccaaacguggaucccaaugcuaacccuaauguagacccaaacgccaaucccaacgcaaauccuaacgccaauccaaacgcuaauccgaacgcaaaucccaacgccaacccuaaugcuaacccaaaugccaaccccaaugcgaacccuaaugcaaacccaaaugccaaccccaaugcuaacccgaaugccaacccuaaugcaaaccccaacgcuaauccaaacgccaauccuaacgcgaaucccaacguggauccaaaugccaaccccaaugcaaacccuaaugcuaacccaaaugccaacccgaaugcuaaccccaacgccaauccuaacgcaaauccaaacgccaaucccaacgcuaauccuaacgcgaauccaaacgcaaaucccaacgccaauccgaacgcuaauccuaacgccaauccaaacgcaaaccccaaugccaacccuaaugcuaaccccaaugccaacccagcagcguacgaaccuagcgacaaacauauuaaggaguacuugaauaaaauacagaacagucucgcugccuauaucaagcccggauccgcaaauaagccaaaagaugaacuggacuacgccaacgauauugagaagaaaaucuguaagauggagaaaugcucuagcgucuucaaugugguuaacuccucaauuggccugaucauggugcucaguuuucuuuuccugaauugaggacuaguuauaagacugacuagcccgaugggccucccaacgggcccuccuccccuccuugcaccgagauuaauaaaaaaaaaaaaaaaaaaaaaaaaaaaaaaaaaaaaaaaaaaaaaaaaaaaaaaaaaaaaaaaaugcaucccccccccccccccccccccccccccccccaaaggcucuuuucagagccaccagaauu

SEQ ID NO: 9114 - RNA, 1864 nt, Artificial Sequence
  mRNA Design i-3 (A64-N5-C30-hSL-N5) comprising derived and/or modified sequence from Pf(3D7)__XP_001351122.1__LumSynt_L(GGS4-GGG)_Pf-CSP(19-397) (opt4)
aggagaaagcuuaccaugcagaucuacgagggcaagcugaccgccgagggccugagauucggcaucguggccagcagauucaaccacgcccugguggacagacugguggagggcgccaucgacgccaucgugagacacggcggcagagaggaggacaucacccuggugagagugcccggcagcugggagauccccguggccgccggcgagcuggccagaaaggaggacaucgacgccgugaucgccaucggcgugcugaucagaggcgccaccccccacuucgacuacaucgccagcgaggugagcaagggccuggccgaccugagccuggagcugagaaagcccaucaccuucggcgugaucaccgccgacacccuggagcaggccaucgagagagccggcaccaagcacggcaacaagggcugggaggccgcccugagcgccaucgagauggccaaccuguucaagagccugagaggcggcagcggcggcagcggcggcagcggcggcagcggcggcggccuguuccaggaguaccagugcuacggcagcagcagcaacaccagagugcugaacgagcugaacuacgacaacgccggcaccaaccuguacaacgagcuggagaugaacuacuacggcaagcaggagaacugguacagccugaagaagaacagcagaagccugggcgagaacgacgacggcaacaacgaggacaacgagaagcugagaaagcccaagcacaagaagcugaagcagcccgccgacggcaaccccgaccccaacgccaaccccaacguggaccccaacgccaaccccaacguggaccccaacgccaaccccaacguggaccccaacgccaaccccaacgccaaccccaacgccaaccccaacgccaaccccaacgccaaccccaacgccaaccccaacgccaaccccaacgccaaccccaacgccaaccccaacgccaaccccaacgccaaccccaacgccaaccccaacgccaaccccaacgccaaccccaacgccaaccccaacgccaaccccaacgccaaccccaacguggaccccaacgccaaccccaacgccaaccccaacgccaaccccaacgccaaccccaacgccaaccccaacgccaaccccaacgccaaccccaacgccaaccccaacgccaaccccaacgccaaccccaacgccaaccccaacgccaaccccaacgccaaccccaacgccaaccccaacgccaaccccaacgccaaccccaacgccaaccccaacgccaaccccaacaagaacaaccagggcaacggccagggccacaacaugcccaacgaccccaacagaaacguggacgagaacgccaacgccaacagcgccgugaagaacaacaacaacgaggagcccagcgacaagcacaucaaggaguaccugaacaagauccagaacagccugagcaccgaguggagccccugcagcgugaccugcggcaacggcauccaggugagaaucaagcccggcagcgccaacaagcccaaggacgagcuggacuacgccaacgacaucgagaagaagaucugcaagauggagaagugcagcagcguguucaacguggugaacagcagcaucggccugaucauggugcugagcuuccuguuccugaacugaggacuaguuauaagacugacuagcccgaugggccucccaacgggcccuccuccccuccuugcaccgagauuaauaaaaaaaaaaaaaaaaaaaaaaaaaaaaaaaaaaaaaaaaaaaaaaaaaaaaaaaaaaaaaaaaugcaucccccccccccccccccccccccccccccccaaaggcucuuuucagagccaccagaauu

SEQ ID NO: 9115 - RNA, 1726 nt, Artificial Sequence
  mRNA Design i-3 (A64-N5-C30-hSL-N5) comprising derived and/or modified sequence from Pf(3D7)__XP_001351122.1__HsALB_Pf-CSP(19-272)_L(PVTN)_HBsAg (opt4)
aggagaaagcuuaccaugaagugggugaccuucaucagccugcuguuccuguucagcagcgccuacagccuguuccaggaguaccagugcuacggcagcagcagcaacaccagagugcugaacgagcugaacuacgacaacgccggcaccaaccuguacaacgagcuggagaugaacuacuacggcaagcaggagaacugguacagccugaagaagaacagcagaagccugggcgagaacgacgacggcaacaacgaggacaacgagaagcugagaaagcccaagcacaagaagcugaagcagcccgccgacggcaaccccgaccccaacgccaaccccaacguggaccccaacgccaaccccaacguggaccccaacgccaaccccaacguggaccccaacgccaaccccaacgccaaccccaacgccaaccccaacgccaaccccaacgccaaccccaacgccaaccccaacgccaaccccaacgccaaccccaacgccaaccccaacgccaaccccaacgccaaccccaacgccaaccccaacgccaaccccaacgccaaccccaacgccaaccccaacgccaaccccaacgccaaccccaacguggaccccaacgccaaccccaacgccaaccccaacgccaaccccaacgccaaccccaacgccaaccccaacgccaaccccaacgccaaccccaacgccaaccccaacgccaaccccaacgccaaccccaacgccaaccccaacgccaaccccaacgccaaccccaacgccaaccccaacgccaaccccaacgccaaccccaacgccaaccccaacgccaacccccccgugaccaacauggagaacaucaccagcggcuuccugggcccccugcuggugcugcaggccggcuucuuccugcugaccagaauccugaccaucccccagagccuggacagcugguggaccagccugaacuuccugggcggcagccccgugugccugggccagaacagccagagccccaccagcaaccacagccccaccagcugcccccccaucugccccggcuacagauggaugugccugagaagauucaucaucuuccuguucauccugcugcugugccugaucuuccugcuggugcugcuggacuaccagggcaugcugcccgugugcccccugauccccggcagcaccaccaccaacaccggccccugcaagaccugcaccacccccgcccagggcaacagcauguuccccagcugcugcugcaccaagcccaccgacggcaacugcaccugcauccccauccccagcagcugggccuucgccaaguaccugugggagugggccagcgugagauucagcuggcugagccugcuggugcccuucgugcagugguucgugggccugagccccaccguguggcugagcgccaucuggaugaugugguacuggggccccagccuguacagcaucgugagccccuucaucccccugcugcccaucuucuucugccuguggguguacaucugaggacuaguuauaagacugacuagcccgaugggccucccaacgggcccuccuccccuccuugcaccgagauuaauaaaaaaaaaaaaaaaaaaaaaaaaaaaaaaaaaaaaaaaaaaaaaaaaaaaaaaaaaaaaaaaaugcaucccccccccccccccccccccccccccccccaaaggcucuuuucagagccaccagaauu

SEQ ID NO: 9116 - RNA, 1843 nt, Artificial Sequence
  mRNA Design i-3 (A64-N5-C30-hSL-N5) comprising derived and/or modified sequence from Pf(3D7)__XP_001351122.1__HsALB_Pf-CSP(19-272)_L(AAY)_Pf-CSP(346-3 65)_L(AAY)_PADRE_L(PVTN)_HBsAg (opt4)
aggagaaagcuuaccaugaagugggugaccuucaucagccugcuguuccuguucagcagcgccuacagccuguuccaggaguaccagugcuacggcagcagcagcaacaccagagugcugaacgagcugaacuacgacaacgccggcaccaaccuguacaacgagcuggagaugaacuacuacggcaagcaggagaacugguacagccugaagaagaacagcagaagccugggcgagaacgacgacggcaacaacgaggacaacgagaagcugagaaagcccaagcacaagaagcugaagcagcccgccgacggcaaccccgaccccaacgccaaccccaacguggaccccaacgccaaccccaacguggaccccaacgccaaccccaacguggaccccaacgccaaccccaacgccaaccccaacgccaaccccaacgccaaccccaacgccaaccccaacgccaaccccaacgccaaccccaacgccaaccccaacgccaaccccaacgccaaccccaacgccaaccccaacgccaaccccaacgccaaccccaacgccaaccccaacgccaaccccaacgccaaccccaacgccaaccccaacguggaccccaacgccaaccccaacgccaaccccaacgccaaccccaacgccaaccccaacgccaaccccaacgccaaccccaacgccaaccccaacgccaaccccaacgccaaccccaacgccaaccccaacgccaaccccaacgccaaccccaacgccaaccccaacgccaaccccaacgccaaccccaacgccaaccccaacgccaaccccaacgccaaccccgccgccuacaucaagcccggcagcgccaacaagcccaaggacgagcuggacuacgccaacgacaucgaggccgccuacgccaaguucguggccgccuggacccugaaggccgccgcccccgugaccaacauggagaacaucaccagcggcuuccugggcccccugcuggugcugcaggccggcuucuuccugcugaccagaauccugaccaucccccagagccuggacagcugguggaccagccugaacuuccugggcggcagccccgugugccugggccagaacagccagagccccaccagcaaccacagccccaccagcugcccccccaucugccccggcuacagauggaugugccugagaagauucaucaucuuccuguucauccugcugcugugccugaucuuccugcuggugcugcuggacuaccagggcaugcugcccgugugcccccugauccccggcagcaccaccaccaacaccggccccugcaagaccugcaccacccccgcccagggcaacagcauguuccccagcugcugcugcaccaagcccaccgacggcaacugcaccugcauccccauccccagcagcugggccuucgccaaguaccugugggagugggccagcgugagauucagcuggcugagccugcuggugcccuucgugcagugguucgugggccugagccccaccguguggcugagcgccaucuggaugaugugguacuggggccccagccuguacagcaucgugagccccuucaucccccugcugcccaucuucuucugccuguggguguacaucugaggacuaguuauaagacugacuagcccgaugggccucccaacgggcccuccuccccuccuugcaccgagauuaauaaaaaaaaaaaaaaaaaaaaaaaaaaaaaaaaaaaaaaaaaaaaaaaaaaaaaaaaaaaaaaaaugcaucccccccccccccccccccccccccccccccaaaggcucuuuucagagccaccagaauu

SEQ ID NO: 9117 - RNA, 2062 nt, Artificial Sequence
  mRNA Design i-3 (A64-N5-C30-hSL-N5) comprising derived and/or modified sequence from Pf(3D7)__XP_001351122.1__HsALB_Pf-CSP(19-384)_L(PVTN)_HBsAg (opt4)
aggagaaagcuuaccaugaagugggugaccuucaucagccugcuguuccuguucagcagcgccuacagccuguuccaggaguaccagugcuacggcagcagcagcaacaccagagugcugaacgagcugaacuacgacaacgccggcaccaaccuguacaacgagcuggagaugaacuacuacggcaagcaggagaacugguacagccugaagaagaacagcagaagccugggcgagaacgacgacggcaacaacgaggacaacgagaagcugagaaagcccaagcacaagaagcugaagcagcccgccgacggcaaccccgaccccaacgccaaccccaacguggaccccaacgccaaccccaacguggaccccaacgccaaccccaacguggaccccaacgccaaccccaacgccaaccccaacgccaaccccaacgccaaccccaacgccaaccccaacgccaaccccaacgccaaccccaacgccaaccccaacgccaaccccaacgccaaccccaacgccaaccccaacgccaaccccaacgccaaccccaacgccaaccccaacgccaaccccaacgccaaccccaacgccaaccccaacguggaccccaacgccaaccccaacgccaaccccaacgccaaccccaacgccaaccccaacgccaaccccaacgccaaccccaacgccaaccccaacgccaaccccaacgccaaccccaacgccaaccccaacgccaaccccaacgccaaccccaacgccaaccccaacgccaaccccaacgccaaccccaacgccaaccccaacgccaaccccaacgccaaccccaacaagaacaaccagggcaacggccagggccacaacaugcccaacgaccccaacagaaacguggacgagaacgccaacgccaacagcgccgugaagaacaacaacaacgaggagcccagcgacaagcacaucaaggaguaccugaacaagauccagaacagccugagcaccgaguggagccccugcagcgugaccugcggcaacggcauccaggugagaaucaagcccggcagcgccaacaagcccaaggacgagcuggacuacgccaacgacaucgagaagaagaucugcaagauggagaagugcagcagcguguucaacguggugaacagcagccccgugaccaacauggagaacaucaccagcggcuuccugggcccccugcuggugcugcaggccggcuucuuccugcugaccagaauccugaccaucccccagagccuggacagcugguggaccagccugaacuuccugggcggcagccccgugugccugggccagaacagccagagccccaccagcaaccacagccccaccagcugcccccccaucugccccggcuacagauggaugugccugagaagauucaucaucuuccuguucauccugcugcugugccugaucuuccugcuggugcugcuggacuaccagggcaugcugcccgugugcccccugauccccggcagcaccaccaccaacaccggccccugcaagaccugcaccacccccgcccagggcaacagcauguuccccagcugcugcugcaccaagcccaccgacggcaacugcaccugcauccccauccccagcagcugggccuucgccaaguaccugugggagugggccagcgugagauucagcuggcugagccugcuggugcccuucgugcagugguucgugggccugagccccaccguguggcugagcgccaucuggaugaugugguacuggggccccagccuguacagcaucgugagccccuucaucccccugcugcccaucuucuucugccuguggguguacaucugaggacuaguuauaagacugacuagcccgaugggccucccaacgggcccuccuccccuccuugcaccgagauuaauaaaaaaaaaaaaaaaaaaaaaaaaaaaaaaaaaaaaaaaaaaaaaaaaaaaaaaaaaaaaaaaaugcaucccccccccccccccccccccccccccccccaaaggcucuuuucagagccaccagaauu

SEQ ID NO: 9118 - RNA, 1879 nt, Artificial Sequence
  mRNA Design i-3 (A64-N5-C30-hSL-N5) comprising derived and/or modified sequence from Pf(3D7)__XP_001351122.1__HsALB_Pf-CSP(19-384)_L(SGG)_Ferritin (opt4)
aggagaaagcuuaccaugaagugggugaccuucaucagccugcuguuccuguucagcagcgccuacagccuguuccaggaguaccagugcuacggcagcagcagcaacaccagagugcugaacgagcugaacuacgacaacgccggcaccaaccuguacaacgagcuggagaugaacuacuacggcaagcaggagaacugguacagccugaagaagaacagcagaagccugggcgagaacgacgacggcaacaacgaggacaacgagaagcugagaaagcccaagcacaagaagcugaagcagcccgccgacggcaaccccgaccccaacgccaaccccaacguggaccccaacgccaaccccaacguggaccccaacgccaaccccaacguggaccccaacgccaaccccaacgccaaccccaacgccaaccccaacgccaaccccaacgccaaccccaacgccaaccccaacgccaaccccaacgccaaccccaacgccaaccccaacgccaaccccaacgccaaccccaacgccaaccccaacgccaaccccaacgccaaccccaacgccaaccccaacgccaaccccaacgccaaccccaacguggaccccaacgccaaccccaacgccaaccccaacgccaaccccaacgccaaccccaacgccaaccccaacgccaaccccaacgccaaccccaacgccaaccccaacgccaaccccaacgccaaccccaacgccaaccccaacgccaaccccaacgccaaccccaacgccaaccccaacgccaaccccaacgccaaccccaacgccaaccccaacgccaaccccaacaagaacaaccagggcaacggccagggccacaacaugcccaacgaccccaacagaaacguggacgagaacgccaacgccaacagcgccgugaagaacaacaacaacgaggagcccagcgacaagcacaucaaggaguaccugaacaagauccagaacagccugagcaccgaguggagccccugcagcgugaccugcggcaacggcauccaggugagaaucaagcccggcagcgccaacaagcccaaggacgagcuggacuacgccaacgacaucgagaagaagaucugcaagauggagaagugcagcagcguguucaacguggugaacagcagcagcggcggccugagcaaggacaucaucaagcugcugaacgagcaggugaacaaggagaugaacagcagcaaccuguacaugagcaugagcagcuggugcuacacccacagccuggacggcgccggccuguuccuguucgaccacgccgccgaggaguacgagcacgccaagaagcugaucaucuuccugaacgagaacaacgugcccgugcagcugaccagcaucagcgcccccgagcacaaguucgagggccugacccagaucuuccagaaggccuacgagcacgagcagcacaucagcgagagcaucaacaacaucguggaccacgccaucaagagcaaggaccacgccaccuucaacuuccugcagugguacguggccgagcagcacgaggaggaggugcuguucaaggacauccuggacaagaucgagcugaucggcaacgagaaccacggccuguaccuggccgaccaguacgugaagggcaucgccaagagcagaaagagcugaggacuaguuauaagacugacuagcccgaugggccucccaacgggcccuccuccccuccuugcaccgagauuaauaaaaaaaaaaaaaaaaaaaaaaaaaaaaaaaaaaaaaaaaaaaaaaaaaaaaaaaaaaaaaaaaugcaucccccccccccccccccccccccccccccccaaaggcucuuuucagagccaccagaauu

SEQ ID NO: 9119 - RNA, 1840 nt, Artificial Sequence
  mRNA Design i-3 (A64-N5-C30-hSL-N5) comprising derived and/or modified sequence from Pf(3D7)__XP_001351122.1__HsALB_Pf-CSP(93-384)_L(PVTN)_HBsAg (opt4)
aggagaaagcuuaccaugaagugggugaccuucaucagccugcuguuccuguucagcagcgccuacagcaagcugaagcagcccgccgacggcaaccccgaccccaacgccaaccccaacguggaccccaacgccaaccccaacguggaccccaacgccaaccccaacguggaccccaacgccaaccccaacgccaaccccaacgccaaccccaacgccaaccccaacgccaaccccaacgccaaccccaacgccaaccccaacgccaaccccaacgccaaccccaacgccaaccccaacgccaaccccaacgccaaccccaacgccaaccccaacgccaaccccaacgccaaccccaacgccaaccccaacgccaaccccaacguggaccccaacgccaaccccaacgccaaccccaacgccaaccccaacgccaaccccaacgccaaccccaacgccaaccccaacgccaaccccaacgccaaccccaacgccaaccccaacgccaaccccaacgccaaccccaacgccaaccccaacgccaaccccaacgccaaccccaacgccaaccccaacgccaaccccaacgccaaccccaacgccaaccccaacaagaacaaccagggcaacggccagggccacaacaugcccaacgaccccaacagaaacguggacgagaacgccaacgccaacagcgccgugaagaacaacaacaacgaggagcccagcgacaagcacaucaaggaguaccugaacaagauccagaacagccugagcaccgaguggagccccugcagcgugaccugcggcaacggcauccaggugagaaucaagcccggcagcgccaacaagcccaaggacgagcuggacuacgccaacgacaucgagaagaagaucugcaagauggagaagugcagcagcguguucaacguggugaacagcagccccgugaccaacauggagaacaucaccagcggcuuccugggcccccugcuggugcugcaggccggcuucuuccugcugaccagaauccugaccaucccccagagccuggacagcugguggaccagccugaacuuccugggcggcagccccgugugccugggccagaacagccagagccccaccagcaaccacagccccaccagcugcccccccaucugccccggcuacagauggaugugccugagaagauucaucaucuuccuguucauccugcugcugugccugaucuuccugcuggugcugcuggacuaccagggcaugcugcccgugugcccccugauccccggcagcaccaccaccaacaccggccccugcaagaccugcaccacccccgcccagggcaacagcauguuccccagcugcugcugcaccaagcccaccgacggcaacugcaccugcauccccauccccagcagcugggccuucgccaaguaccugugggagugggccagcgugagauucagcuggcugagccugcuggugcccuucgugcagugguucgugggccugagccccaccguguggcugagcgccaucuggaugaugugguacuggggccccagccuguacagcaucgugagccccuucaucccccugcugcccaucuucuucugccuguggguguacaucugaggacuaguuauaagacugacuagcccgaugggccucccaacgggcccuccuccccuccuugcaccgagauuaauaaaaaaaaaaaaaaaaaaaaaaaaaaaaaaaaaaaaaaaaaaaaaaaaaaaaaaaaaaaaaaaaugcaucccccccccccccccccccccccccccccccaaaggcucuuuucagagccaccagaauu

SEQ ID NO: 9120 - RNA, 1501 nt, Artificial Sequence; identical to SEQ ID NO: 1966
  mRNA Design i-3 (A64-N5-C30-hSL-N5) comprising derived and/or modified sequence from Pf(3D7)__XP_001351122.1__HsALB_Pf-CSP(199-377)_L(PVTN)_HBsAg (opt4)

SEQ ID NO: 9121 - RNA, 1198 nt, Artificial Sequence
  mRNA Design i-3 (A64-N5-C30-hSL-N5) comprising derived and/or modified sequence from Pf(3D7)__XP_001351122.1__HsALB_Pf-CSP(19-272)_L(AAY)_Pf-CSP(346-3 75)_L(AAY)_Pf-CSP(310-327) (opt4)
aggagaaagcuuaccaugaagugggugaccuucaucagccugcuguuccuguucagcagcgccuacagccuguuccaggaguaccagugcuacggcagcagcagcaacaccagagugcugaacgagcugaacuacgacaacgccggcaccaaccuguacaacgagcuggagaugaacuacuacggcaagcaggagaacugguacagccugaagaagaacagcagaagccugggcgagaacgacgacggcaacaacgaggacaacgagaagcugagaaagcccaagcacaagaagcugaagcagcccgccgacggcaaccccgaccccaacgccaaccccaacguggaccccaacgccaaccccaacguggaccccaacgccaaccccaacguggaccccaacgccaaccccaacgccaaccccaacgccaaccccaacgccaaccccaacgccaaccccaacgccaaccccaacgccaaccccaacgccaaccccaacgccaaccccaacgccaaccccaacgccaaccccaacgccaaccccaacgccaaccccaacgccaaccccaacgccaaccccaacgccaaccccaacgccaaccccaacguggaccccaacgccaaccccaacgccaaccccaacgccaaccccaacgccaaccccaacgccaaccccaacgccaaccccaacgccaaccccaacgccaaccccaacgccaaccccaacgccaaccccaacgccaaccccaacgccaaccccaacgccaaccccaacgccaaccccaacgccaaccccaacgccaaccccaacgccaaccccaacgccaaccccgccgccuacaucaagcccggcagcgccaacaagcccaaggacgagcuggacuacgccaacgacaucgagaagaagaucugcaagauggagaagugcagcgccgccuacgagcccagcgacaagcacaucaaggaguaccugaacaagauccagaacagccugugaggacuaguuauaagacugacuagcccgaugggccucccaacgggcccuccuccccuccuugcaccgagauuaauaaaaaaaaaaaaaaaaaaaaaaaaaaaaaaaaaaaaaaaaaaaaaaaaaaaaaaaaaaaaaaaaugcaucccccccccccccccccccccccccccccccaaaggcucuuuucagagccaccagaauu

SEQ ID NO: 9122 - RNA, 1246 nt, Artificial Sequence
  mRNA Design i-3 (A64-N5-C30-hSL-N5) comprising derived and/or modified sequence from Pf(3D7)__XP_001351122.1__HsALB_Pf-CSP(19-272)_L(AAY)_Pf-CSP(346-3 75)_L(AAY)_Pf-CSP(310-327)_L(AAY)_PADRE (opt4)
aggagaaagcuuaccaugaagugggugaccuucaucagccugcuguuccuguucagcagcgccuacagccuguuccaggaguaccagugcuacggcagcagcagcaacaccagagugcugaacgagcugaacuacgacaacgccggcaccaaccuguacaacgagcuggagaugaacuacuacggcaagcaggagaacugguacagccugaagaagaacagcagaagccugggcgagaacgacgacggcaacaacgaggacaacgagaagcugagaaagcccaagcacaagaagcugaagcagcccgccgacggcaaccccgaccccaacgccaaccccaacguggaccccaacgccaaccccaacguggaccccaacgccaaccccaacguggaccccaacgccaaccccaacgccaaccccaacgccaaccccaacgccaaccccaacgccaaccccaacgccaaccccaacgccaaccccaacgccaaccccaacgccaaccccaacgccaaccccaacgccaaccccaacgccaaccccaacgccaaccccaacgccaaccccaacgccaaccccaacgccaaccccaacgccaaccccaacguggaccccaacgccaaccccaacgccaaccccaacgccaaccccaacgccaaccccaacgccaaccccaacgccaaccccaacgccaaccccaacgccaaccccaacgccaaccccaacgccaaccccaacgccaaccccaacgccaaccccaacgccaaccccaacgccaaccccaacgccaaccccaacgccaaccccaacgccaaccccaacgccaaccccgccgccuacaucaagcccggcagcgccaacaagcccaaggacgagcuggacuacgccaacgacaucgagaagaagaucugcaagauggagaagugcagcgccgccuacgagcccagcgacaagcacaucaaggaguaccugaacaagauccagaacagccuggccgccuacgccaaguucguggccgccuggacccugaaggccgccgccugaggacuaguuauaagacugacuagcccgaugggccucccaacgggcccuccuccccuccuugcaccgagauuaauaaaaaaaaaaaaaaaaaaaaaaaaaaaaaaaaaaaaaaaaaaaaaaaaaaaaaaaaaaaaaaaaugcaucccccccccccccccccccccccccccccccaaaggcucuuuucagagccaccagaauu

SEQ ID NO: 9123 - RNA, 1246 nt, Artificial Sequence
  mRNA Design i-3 (A64-N5-C30-hSL-N5) comprising derived and/or modified sequence from Pf(3D7)__XP_001351122.1__HsALB_Pf-CSP(19-272)_L(AAY)_Pf-CSP(310-3 27)_L(AAY)_Pf-CSP(346-375)_L(AAY)_PADRE (opt4)
aggagaaagcuuaccaugaagugggugaccuucaucagccugcuguuccuguucagcagcgccuacagccuguuccaggaguaccagugcuacggcagcagcagcaacaccagagugcugaacgagcugaacuacgacaacgccggcaccaaccuguacaacgagcuggagaugaacuacuacggcaagcaggagaacugguacagccugaagaagaacagcagaagccugggcgagaacgacgacggcaacaacgaggacaacgagaagcugagaaagcccaagcacaagaagcugaagcagcccgccgacggcaaccccgaccccaacgccaaccccaacguggaccccaacgccaaccccaacguggaccccaacgccaaccccaacguggaccccaacgccaaccccaacgccaaccccaacgccaaccccaacgccaaccccaacgccaaccccaacgccaaccccaacgccaaccccaacgccaaccccaacgccaaccccaacgccaaccccaacgccaaccccaacgccaaccccaacgccaaccccaacgccaaccccaacgccaaccccaacgccaaccccaacgccaaccccaacguggaccccaacgccaaccccaacgccaaccccaacgccaaccccaacgccaaccccaacgccaaccccaacgccaaccccaacgccaaccccaacgccaaccccaacgccaaccccaacgccaaccccaacgccaaccccaacgccaaccccaacgccaaccccaacgccaaccccaacgccaaccccaacgccaaccccaacgccaaccccaacgccaaccccgccgccuacgagcccagcgacaagcacaucaaggaguaccugaacaagauccagaacagccuggccgccuacaucaagcccggcagcgccaacaagcccaaggacgagcuggacuacgccaacgacaucgagaagaagaucugcaagauggagaagugcagcgccgccuacgccaaguucguggccgccuggacccugaaggccgccgccugaggacuaguuauaagacugacuagcccgaugggccucccaacgggcccuccuccccuccuugcaccgagauuaauaaaaaaaaaaaaaaaaaaaaaaaaaaaaaaaaaaaaaaaaaaaaaaaaaaaaaaaaaaaaaaaaugcaucccccccccccccccccccccccccccccccaaaggcucuuuucagagccaccagaauu

SEQ ID NO: 9124 - RNA, 1300 nt, Artificial Sequence
  mRNA Design i-3 (A64-N5-C30-hSL-N5) comprising derived and/or modified sequence from Pf(3D7)__XP_001351122.1__HsALB_Pf-CSP(19-272)_L(AAY)_Pf-CSP(310-3 27)_L(AAY)_Pf-CSP(346-375)_L(AAY)_PADRE_L(AAY)_P2 (opt4)
aggagaaagcuuaccaugaagugggugaccuucaucagccugcuguuccuguucagcagcgccuacagccuguuccaggaguaccagugcuacggcagcagcagcaacaccagagugcugaacgagcugaacuacgacaacgccggcaccaaccuguacaacgagcuggagaugaacuacuacggcaagcaggagaacugguacagccugaagaagaacagcagaagccugggcgagaacgacgacggcaacaacgaggacaacgagaagcugagaaagcccaagcacaagaagcugaagcagcccgccgacggcaaccccgaccccaacgccaaccccaacguggaccccaacgccaaccccaacguggaccccaacgccaaccccaacguggaccccaacgccaaccccaacgccaaccccaacgccaaccccaacgccaaccccaacgccaaccccaacgccaaccccaacgccaaccccaacgccaaccccaacgccaaccccaacgccaaccccaacgccaaccccaacgccaaccccaacgccaaccccaacgccaaccccaacgccaaccccaacgccaaccccaacgccaaccccaacguggaccccaacgccaaccccaacgccaaccccaacgccaaccccaacgccaaccccaacgccaaccccaacgccaaccccaacgccaaccccaacgccaaccccaacgccaaccccaacgccaaccccaacgccaaccccaacgccaaccccaacgccaaccccaacgccaaccccaacgccaaccccaacgccaaccccaacgccaaccccaacgccaaccccgccgccuacgagcccagcgacaagcacaucaaggaguaccugaacaagauccagaacagccuggccgccuacaucaagcccggcagcgccaacaagcccaaggacgagcuggacuacgccaacgacaucgagaagaagaucugcaagauggagaagugcagcgccgccuacgccaaguucguggccgccuggacccugaaggccgccgccgccgccuaccaguacaucaaggccaacagcaaguucaucggcaucaccgagcugugaggacuaguuauaagacugacuagcccgaugggccucccaacgggcccuccuccccuccuugcaccgagauuaauaaaaaaaaaaaaaaaaaaaaaaaaaaaaaaaaaaaaaaaaaaaaaaaaaaaaaaaaaaaaaaaaugcaucccccccccccccccccccccccccccccccaaaggcucuuuucagagccaccagaauu

SEQ ID NO: 9125 - RNA, 1264 nt, Artificial Sequence
  mRNA Design i-3 (A64-N5-C30-hSL-N5) comprising derived and/or modified sequence from Pf(3D7)__XP_001351122.1__HsALB_Pf-CSP(19-272)_L(AAY)_Pf-CSP(310-3 27)_Linker (AAY)_Pf-CSP(346-397) (opt4)
aggagaaagcuuaccaugaagugggugaccuucaucagccugcuguuccuguucagcagcgccuacagccuguuccaggaguaccagugcuacggcagcagcagcaacaccagagugcugaacgagcugaacuacgacaacgccggcaccaaccuguacaacgagcuggagaugaacuacuacggcaagcaggagaacugguacagccugaagaagaacagcagaagccugggcgagaacgacgacggcaacaacgaggacaacgagaagcugagaaagcccaagcacaagaagcugaagcagcccgccgacggcaaccccgaccccaacgccaaccccaacguggaccccaacgccaaccccaacguggaccccaacgccaaccccaacguggaccccaacgccaaccccaacgccaaccccaacgccaaccccaacgccaaccccaacgccaaccccaacgccaaccccaacgccaaccccaacgccaaccccaacgccaaccccaacgccaaccccaacgccaaccccaacgccaaccccaacgccaaccccaacgccaaccccaacgccaaccccaacgccaaccccaacgccaaccccaacguggaccccaacgccaaccccaacgccaaccccaacgccaaccccaacgccaaccccaacgccaaccccaacgccaaccccaacgccaaccccaacgccaaccccaacgccaaccccaacgccaaccccaacgccaaccccaacgccaaccccaacgccaaccccaacgccaaccccaacgccaaccccaacgccaaccccaacgccaaccccaacgccaaccccgccgccuacgagcccagcgacaagcacaucaaggaguaccugaacaagauccagaacagccuggccgccuacaucaagcccggcagcgccaacaagcccaaggacgagcuggacuacgccaacgacaucgagaagaagaucugcaagauggagaagugcagcagcguguucaacguggugaacagcagcaucggccugaucauggugcugagcuuccuguuccugaacugaggacuaguuauaagacugacuagcccgaugggccucccaacgggcccuccuccccuccuugcaccgagauuaauaaaaaaaaaaaaaaaaaaaaaaaaaaaaaaaaaaaaaaaaaaaaaaaaaaaaaaaaaaaaaaaaugcaucccccccccccccccccccccccccccccccaaaggcucuuuucagagccaccagaauu

SEQ ID NO: 9126 - RNA, 1864 nt, Artificial Sequence
  mRNA Design i-3 (A64-N5-C30-hSL-N5) comprising derived and/or modified sequence from Pf(3D7)__XP_001351122.1__LumSynt_L(GGS4-GGG)_Pf-CSP(19-397) (opt5)
aggagaaagcuuaccaugcagaucuacgagggcaagcugaccgccgaagggcucagauucggaauuguggcuagccgguuuaaccacgcccuggucgaccgccuuguugagggcgcgaucgaugcuauugugagacaugggggacgggaagaggacaucacacuggugcgcguccccggcuccugggaaauuccuguggccgccggggagcucgcuagaaaagaggauaucgacgccguuaucgcuauuggagugcugauccggggcgccacgccgcacuucgauuauauugcgucugaagucagcaagggccuugccgaccugucccucgagcugcgcaaacccaucaccuuuggggugauuacagcugauacccuggaacaagccaucgagagagcuggaacaaagcauggcaauaaagggugggaggccgcgcucucugccauugaaauggcuaaccuguucaagagccuucggggaggcuccgggggaucuggcggcagcgggggauccggcgggggacuguuucaggaguaccagugcuauggcuccucuuccaauacccgcguucucaacgaacugaauuacgacaacgccgggacaaaucuuuauaacgagcuggaaaugaauuacuauggaaagcaggagaacugguacagccucaaaaagaacucuagaucccugggcgagaaugaugacggcaauaacgaagauaaugagaaacugcggaagccuaaacacaagaagcucaaacaacccgcugacgggaacccugaucccaacgccaauccuaacguggacccgaaugccaaccccaaugucgacccuaacgcuaaucccaacguggauccuaaugcgaaccccaaugccaacccgaaugcuaacccuaaugccaaccccaacgccaauccuaacgcuaaucccaacgccaaucccaacgcgaauccuaacgcuaauccgaacgccaaucccaacgccaauccuaacgcuaaucccaacgccaacccuaaugcuaaccccaaugccaacccgaaugcgaacccuaaugccaaccccaauguggacccuaacgcuaaucccaacgccaauccuaacgcuaaucccaacgccaacccgaaugcgaacccuaaugccaaccccaaugcuaaccccaaugccaacccuaaugcuaacccgaaugccaaccccaaugccaacccuaaugcuaaccccaaugcgaacccuaacgccaaucccaacgcuaauccuaacgccaaucccaacgccaauccgaacgcuaauccuaacaagaauaaccagggaaauggccaggggcauaacaugcccaaugauccuaaccgcaacgucgacgaaaaugccaacgcgaauagcgcuguuaaaaacaauaacaaugaggaacccucugauaagcacaucaaagaguaccugaacaagauccagaauagccuuagcaccgagugguccccguguucugugacgugcggaaacggcauucaagugagaaucaaaccugggagcgccaauaagcccaaggacgaacuggauuaugccaacgacauugagaaaaagaucuguaaaauggaaaagugcuccagcgucuucaaugugguuaacucuuccauuggccucaucauggugcugagcuuucuuuuccugaauugaggacuaguuauaagacugacuagcccgaugggccucccaacgggcccuccuccccuccuugcaccgagauuaauaaaaaaaaaaaaaaaaaaaaaaaaaaaaaaaaaaaaaaaaaaaaaaaaaaaaaaaaaaaaaaaaugcaucccccccccccccccccccccccccccccccaaaggcucuuuucagagccaccagaauu

SEQ ID NO: 9127 - RNA, 1726 nt, Artificial Sequence
  mRNA Design i-3 (A64-N5-C30-hSL-N5) comprising derived and/or modified sequence from Pf(3D7)__XP_001351122.1__HsALB_Pf-CSP(19-272)_L(PVTN)_HBsAg (opt5)
aggagaaagcuuaccaugaagugggugaccuucaucagccugcucuuucuguucuccucugccuacagccuuuuucaggaguaucaaugcuacggcuccucuagcaacacaagaguccugaaugaacucaacuaugacaaugcugggacgaaccuguacaaugagcuugaaaugaacuauuacggaaaacaggagaauugguauucccugaagaaaaacucucggagccucggcgaaaaugaugacgggaacaaugaggauaacgagaagcugcgcaaacccaagcacaagaaacugaagcagccugccgacggaaauccggaucccaacgcgaauccuaacguugaccccaacgcuaauccuaacguggaucccaaugccaacccuaauguggacccgaacgccaaucccaacgcuaauccuaacgccaaucccaacgcuaauccuaacgccaaucccaacgcgaacccgaaugccaacccuaaugcuaaccccaaugccaacccuaaugcuaaccccaaugccaaccccaaugcgaacccuaaugccaacccgaaugcuaaccccaacgccaauccuaacgcuaaucccaacgccaauccuaacgucgaucccaaugccaacccgaaugcuaacccuaaugcgaaccccaaugccaacccuaaugcuaaccccaacgccaauccuaacgccaaucccaacgcuaauccgaacgccaauccuaacgcgaaucccaacgcuaaucccaacgccaauccuaacgccaauccgaacgcuaaucccaacgccaacccuaaugcuaaccccaaugccaacccuaaugcgaaucccccugugaccaacauggaaaacauuacauccggcuuccucgggccccugcuuguucugcaggccggauuuuuccuccugaccagaauccuuacaauuccgcaaagccuggacucuugguggaccucccucaauuuucugggcggcagcccugugugucuggggcagaacucucagucccccacaagcaaucauucuccuaccuccugucccccgaucugcccuggauaccgguggaugugccuccgcagauucauuaucuuucuguucauccuucugcucugucugauuuuucuucugguccuccuggauuaccagggcaugcugcccgugugcccucucauccccgggagcacgaccacaaacaccggacccuguaaaacaugcaccacgccugcucaaggcaauuccauguucccgucuuguugcuguacaaagcccaccgacgggaacugcacaugcauuccuauccccagcuccugggccuuugcuaaauaucugugggagugggccagcguucgguucucuuggcuuucccugcucgugccuuucguccagugguuugugggacugagccccaccguguggcuuucugcgauuuggaugaugugguacuggggcccuagccuguauuccaucgucucuccguucauuccccuccugccuaucuuuuucugucuguggguuuacaucugaggacuaguuauaagacugacuagcccgaugggccucccaacgggcccuccuccccuccuugcaccgagauuaauaaaaaaaaaaaaaaaaaaaaaaaaaaaaaaaaaaaaaaaaaaaaaaaaaaaaaaaaaaaaaaaaugcaucccccccccccccccccccccccccccccccaaaggcucuuuucagagccaccagaauu

SEQ ID NO: 9128 - RNA, 1843 nt, Artificial Sequence
  mRNA Design i-3 (A64-N5-C30-hSL-N5) comprising derived and/or modified sequence from Pf(3D7)__XP_001351122.1__HsALB_Pf-CSP(19-272)_L(AAY)_Pf-CSP(346-3 65)_L(AAY)_PADRE_L(PVTN)_HBsAg (opt5)
aggagaaagcuuaccaugaagugggugaccuucaucagccugcucuuucuguucuccucugccuacagccuuuuucaggaguaucaaugcuacggcuccucuagcaacacaagaguccugaaugaacucaacuaugacaaugcugggacgaaccuguacaaugagcuugaaaugaacuauuacggaaaacaggagaauugguauucccugaagaaaaacucucggagccucggcgaaaaugaugacgggaacaaugaggauaacgagaagcugcgcaaacccaagcacaagaaacugaagcagccugccgacggaaauccggaucccaacgcgaauccuaacguugaccccaacgcuaauccuaacguggaucccaaugccaacccuaauguggacccgaacgccaaucccaacgcuaauccuaacgccaaucccaacgcuaauccuaacgccaaucccaacgcgaacccgaaugccaacccuaaugcuaaccccaaugccaacccuaaugcuaaccccaaugccaaccccaaugcgaacccuaaugccaacccgaaugcuaaccccaacgccaauccuaacgcuaaucccaacgccaauccuaacgucgaucccaaugccaacccgaaugcuaacccuaaugcgaaccccaaugccaacccuaaugcuaaccccaacgccaauccuaacgccaaucccaacgcuaauccgaacgccaauccuaacgcgaaucccaacgcuaaucccaacgccaauccuaacgccaauccgaacgcuaaucccaacgccaacccuaaugcuaaccccaaugccaacccuaaugcgaaccccgccgcuuacauuaaaccuggcuccgccaauaagcccaaagacgaacucgauuacgcuaacgacaucgaggccgcguaugccaaguucguggcugccuggacccugaaggcugccgccccgguuacaaauauggaaaacauuaccagcggguuucuuggaccucugcucgugcugcaggcuggcuucuuucuucugacaagaauccucaccauuccccaaucucuggauuccugguggacaagccugaauuuccucggcgggucuccugucugucugggacagaacucccagagccccaccucuaaucauuccccgacgagcugcccucccaucuguccuggcuaccgguggaugugccuucgcagauuuaucauuuuccuguuuauccuccugcuuugucugauuuuccuccuggugcugcucgacuaucaggggaugcugcccguuugcccccuuaucccuggauccaccacaaccaacacaggcccguguaaaaccugcacgacacccgcgcaaggaaauucuauguuuccuagcuguugcuguaccaagcccacagacgggaacuguaccugcauuccuauccccuccagcugggccuucgcuaaauaccugugggagugggccucugugcgguucuccuggcucagccugcuugucccuuuugugcagugguucgugggccugucuccgaccgucuggcucagcgccauuuggaugaugugguauuggggccccucccuguacucuaucguuagcccuuuuaucccccugcucccuauuuucuuuugccuguggguguauaucugaggacuaguuauaagacugacuagcccgaugggccucccaacgggcccuccuccccuccuugcaccgagauuaauaaaaaaaaaaaaaaaaaaaaaaaaaaaaaaaaaaaaaaaaaaaaaaaaaaaaaaaaaaaaaaaaugcaucccccccccccccccccccccccccccccccaaaggcucuuuucagagccaccagaauu

SEQ ID NO: 9129 - RNA, 2062 nt, Artificial Sequence
  mRNA Design i-3 (A64-N5-C30-hSL-N5) comprising derived and/or modified sequence from Pf(3D7)__XP_001351122.1__HsALB_Pf-CSP(19-384)_L(PVTN)_HBsAg (opt5)
aggagaaagcuuaccaugaagugggugaccuucaucagccugcucuuucuguucuccucugccuacagccuuuuucaggaguaucaaugcuacggcuccucuagcaacacaagaguccugaaugaacucaacuaugacaaugcugggacgaaccuguacaaugagcuugaaaugaacuauuacggaaaacaggagaauugguauucccugaagaaaaacucucggagccucggcgaaaaugaugacgggaacaaugaggauaacgagaagcugcgcaaacccaagcacaagaaacugaagcagccugccgacggaaauccggaucccaacgcgaauccuaacguugaccccaacgcuaauccuaacguggaucccaaugccaacccuaauguggacccgaacgccaaucccaacgcuaauccuaacgccaaucccaacgcuaauccuaacgccaaucccaacgcgaacccgaaugccaacccuaaugcuaaccccaaugccaacccuaaugcuaaccccaaugccaaccccaaugcgaacccuaaugccaacccgaaugcuaaccccaacgccaauccuaacgcuaaucccaacgccaauccuaacgucgaucccaaugccaacccgaaugcuaacccuaaugcgaaccccaaugccaacccuaaugcuaaccccaacgccaauccuaacgccaaucccaacgcuaauccgaacgccaauccuaacgcgaaucccaacgcuaaucccaacgccaauccuaacgccaauccgaacgcuaaucccaacgccaacccuaaugcuaaccccaaugccaacccuaaugcgaaccccaauaaaaacaaucagggcaacgggcaaggacauaauaugccuaacgaccccaauagaaacguggaugaaaaugccaacgcuaacuccgccguuaagaauaacaauaacgaggaaccgagcgacaaacacauuaaggaguaccucaauaagauccagaacucucuguccaccgaguggagcccuuguucugugacaugcggcaauggcauucagguccggaucaaacccggguccgcuaacaagccuaaagaugaacuugacuacgccaaugacauugagaagaaaaucuguaagauggaaaaaugcagcucuguguucaacguugucaauuccagccccgugaccaacauggagaauaucacauccggauuucugggcccgcuccuggugcuucaggcgggguucuuucugcucacccgcauucugacaaucccucaaucucuggauagcugguggaccucccucaacuuccugggaggcagccccgugugucuugggcaaaauucucaguccccuacgagcaaccauucucccaccagcugucccccuauuugcccgggauauagauggaugugccugcggcgcuuuaucauuuuccucuuuauccugcuucugugucucauuuuccugcugguccuccuggacuaccagggcaugcuucccguuugcccucugauccccggcuccacaaccacaaacaccgggccuuguaagacgugcacaacccccgcccagggaaauucuauguuuccuagcugcuguugcacaaagccgaccgauggcaacuguaccugcauccccauuccuuccagcugggcuuucgccaaauaucucugggaaugggcuucugugagauucuccuggcugagccuucuggugcccuuuguccagugguucguggggcucucuccuacaguuuggcuguccgccaucuggaugaugugguacuggggacccagccuguauuccauugugucuccguuuaucccucuccugcccauuuucuuuugucuuugggucuacaucugaggacuaguuauaagacugacuagcccgaugggccucccaacgggcccuccuccccuccuugcaccgagauuaauaaaaaaaaaaaaaaaaaaaaaaaaaaaaaaaaaaaaaaaaaaaaaaaaaaaaaaaaaaaaaaaaugcaucccccccccccccccccccccccccccccccaaaggcucuuuucagagccaccagaauu

SEQ ID NO: 9130 - RNA, 1879 nt, Artificial Sequence
  mRNA Design i-3 (A64-N5-C30-hSL-N5) comprising derived and/or modified sequence from Pf(3D7)__XP_001351122.1__HsALB_Pf-CSP(19-384)_L(SGG)_Ferritin (opt5)
aggagaaagcuuaccaugaagugggugaccuucaucagccugcucuuucuguucuccucugccuacagccuuuuucaggaguaucaaugcuacggcuccucuagcaacacaagagugcugaaugaacucaacuaugacaaugcugggacgaaccuguacaaugagcuugaaaugaacuauuacggaaaacaggagaauugguauucccugaagaaaaacucucggagccucggcgaaaaugaugacgggaacaaugaggauaacgagaagcugcgcaaacccaagcacaagaaacugaagcagccugccgacggaaauccggaucccaacgcgaauccuaacguugaccccaacgcuaauccuaacguggaucccaaugccaacccuaauguggacccgaacgccaaucccaacgcuaauccuaacgccaaucccaacgcuaauccuaacgccaaucccaacgcgaacccgaaugccaacccuaaugcuaaccccaaugccaacccuaaugcuaaccccaaugccaaccccaaugcgaacccuaaugccaacccgaaugcuaaccccaacgccaauccuaacgcuaaucccaacgccaauccuaacgucgaucccaaugccaacccgaaugcuaacccuaaugcgaaccccaaugccaacccuaaugcuaaccccaacgccaauccuaacgccaaucccaacgcuaauccgaacgccaauccuaacgcgaaucccaacgcuaaucccaacgccaauccuaacgccaauccgaacgcuaaucccaacgccaacccuaaugcuaaccccaaugccaacccuaaugcgaaccccaauaaaaacaaucagggcaacgggcaaggacauaauaugccuaacgaccccaauagaaacguggaugaaaaugccaacgcuaacuccgccguuaagaauaacaauaacgaggaaccgagcgacaaacacauuaaggaguaccucaauaagauccagaacucucuguccaccgaguggagcccuuguucugugacaugcggcaauggcauucagguccggaucaaacccggguccgcuaacaagccuaaagaugaacuugacuacgccaaugacauugagaagaaaaucuguaagauggaaaaaugcagcucuguguucaacguugugaacuccagcuccggaggccugucuaaggauaucauuaagcuccugaaugagcaggucaauaaagaaaugaacagcuccaaucuuuauaugagcaugucuuccugguguuacacccauagccuggacggggcgggacucuuucuguucgaucacgccgcugaggaguaugaacaugccaagaaacugaucauuuuucucaacgagaacaaugugcccgugcaacugacaucuaucagcgcuccggaacacaaguucgagggccuuacccagauuuuucagaaagccuacgaacacgagcagcauaucuccgagucuauuaacaauaucgucgaccacgccaucaagagcaaggaucaugcuacauucaacuuucugcaaugguauguugcggaacagcacgaggaagagguccucuucaaagacauucuggauaagaucgaacuuauugggaaugagaaccacggacuguaccucgccgaccaguaugugaaaggcaucgcuaagucccgcaaaagcugaggacuaguuauaagacugacuagcccgaugggccucccaacgggcccuccuccccuccuugcaccgagauuaauaaaaaaaaaaaaaaaaaaaaaaaaaaaaaaaaaaaaaaaaaaaaaaaaaaaaaaaaaaaaaaaaugcaucccccccccccccccccccccccccccccccaaaggcucuuuucagagccaccagaauu

SEQ ID NO: 9131 - RNA, 1840 nt, Artificial Sequence
  mRNA Design i-3 (A64-N5-C30-hSL-N5) comprising derived and/or modified sequence from Pf(3D7)__XP_001351122.1__HsALB_Pf-CSP(93-384)_L(PVTN)_HBsAg (opt5)
aggagaaagcuuaccaugaagugggugaccuucaucagccugcucuuucuguucuccucugccuacagcaaacuuaagcagcccgcugacggcaacccugauccgaaugccaaccccaaugucgacccuaacgcgaaucccaacguugauccuaaugcuaaccccaauguggacccuaacgccaauccgaacgccaaucccaacgcuaauccuaacgccaaccccaaugcuaacccuaaugccaaccccaaugcgaacccgaaugccaacccuaaugcuaaccccaaugccaacccuaaugcuaaccccaaugccaaccccaacgcgaauccuaacgccaauccgaacgcuaaucccaacgccaauccuaacgcuaaucccaacguggauccuaaugccaaccccaaugccaacccgaaugcuaacccuaacgcgaaucccaacgccaauccuaacgcuaaucccaacgccaauccuaacgccaaucccaacgcuaauccgaacgccaauccuaacgcgaaucccaacgcuaaccccaaugccaacccuaaugccaacccgaaugcuaaccccaaugccaacccuaaugcuaaccccaaugccaacccuaauaaaaacaaucaagggaacggacagggccacaauaugcccaacgacccuaacagaaaugucgaugagaacgcgaaugccaacuccgcugugaagaauaacaauaacgaggaacccucugacaaacauauuaaggaauaucugaauaagauccagaacagccucuccacagaguggucuccgugcagcguuacgugugggaaugggauucaggugcggaucaaaccuggcuccgccaacaagcccaaagaugaacuggacuacgcuaaugauauugagaagaaaaucugcaagauggagaaguguagcucugucuuuaacgugguuaauuccagcccugugaccaacauggaaaacaucacaucuggguuccuuggaccccugcucguccugcaagccggcuuuuuccugcucacccgcauucugacaaucccgcagucccuugacagcugguggaccucucugaauuuucucggcggguccccugugugccugggacagaacagccagucccccacaucuaaucacagcccuaccuccuguccucccauuugccccggcuauagauggaugugucuucggcgcuucaucauuuuucuguucauccuccugcugugccucauuuuucugcuugugcugcucgauuaccaagggaugcugccggucuguccccuuaucccuggaagcacgaccacaaacaccggccccugcaaaacauguaccacgccugcgcagggaaauucuauguuccccuccugcugcuguacaaagccuaccgacggaaacugcacauguaucccgauucccagcucuugggccuuugcuaaauaucugugggagugggccagcguuagauucuccuggcucucucugcuggugccuuucgugcagugguuugucggccucagccccaccguguggcuguccgcuaucuggaugaugugguacuggggcccuagccuuuauucuauuguuucccccuucaucccgcugcucccuaucuuuuucugccuguggguguacauuugaggacuaguuauaagacugacuagcccgaugggccucccaacgggcccuccuccccuccuugcaccgagauuaauaaaaaaaaaaaaaaaaaaaaaaaaaaaaaaaaaaaaaaaaaaaaaaaaaaaaaaaaaaaaaaaaugcaucccccccccccccccccccccccccccccccaaaggcucuuuucagagccaccagaauu

SEQ ID NO: 9132 - RNA, 1501 nt, Artificial Sequence; identical to SEQ ID NO: 2002
  mRNA Design i-3 (A64-N5-C30-hSL-N5) comprising derived and/or modified sequence from Pf(3D7)__XP_001351122.1__HsALB_Pf-CSP(199-377)_L(PVTN)_HBsAg (opt5)

SEQ ID NO: 9133 - RNA, 1198 nt, Artificial Sequence
  mRNA Design i-3 (A64-N5-C30-hSL-N5) comprising derived and/or modified sequence from Pf(3D7)__XP_001351122.1__HsALB_Pf-CSP(19-272)_L(AAY)_Pf-CSP(346-3 75)_L(AAY)_Pf-CSP(310-327) (opt5)
aggagaaagcuuaccaugaagugggugaccuucaucagccugcucuuucuguucuccucugccuacagccuuuuucaggaguaucaaugcuacggcuccucuagcaacacaagaguccugaaugaacucaacuaugacaaugcugggacgaaccuguacaaugagcuugaaaugaacuauuacggaaaacaggagaauugguauucccugaagaaaaacucucggagccucggcgaaaaugaugacgggaacaaugaggauaacgagaagcugcgcaaacccaagcacaagaaacugaagcagccugccgacggaaauccggaucccaacgcgaauccuaacguugaccccaacgcuaauccuaacguggaucccaaugccaacccuaauguggacccgaacgccaaucccaacgcuaauccuaacgccaaucccaacgcuaauccuaacgccaaucccaacgcgaacccgaaugccaacccuaaugcuaaccccaaugccaacccuaaugcuaaccccaaugccaaccccaaugcgaacccuaaugccaacccgaaugcuaaccccaacgccaauccuaacgcuaaucccaacgccaauccuaacgucgaucccaaugccaacccgaaugcuaacccuaaugcgaaccccaaugccaacccuaaugcuaaccccaacgccaauccuaacgccaaucccaacgcuaauccgaacgccaauccuaacgcgaaucccaacgcuaaucccaacgccaauccuaacgccaauccgaacgcuaaucccaacgccaacccuaaugcuaaccccaaugccaacccuaaugcgaaccccgccgcuuacauuaaaccuggcuccgccaauaagcccaaagacgaacucgauuacgcuaacgacaucgagaagaagauuuguaaaauggaaaagugcagcgccgcguaugagccgucugauaaacauaucaaggaguaccugaauaaaauucagaacucccuuugaggacuaguuauaagacugacuagcccgaugggccucccaacgggcccuccuccccuccuugcaccgagauuaauaaaaaaaaaaaaaaaaaaaaaaaaaaaaaaaaaaaaaaaaaaaaaaaaaaaaaaaaaaaaaaaaugcaucccccccccccccccccccccccccccccccaaaggcucuuuucagagccaccagaauu

SEQ ID NO: 9134 - RNA, 1246 nt, Artificial Sequence
  mRNA Design i-3 (A64-N5-C30-hSL-N5) comprising derived and/or modified sequence from Pf(3D7)__XP_001351122.1__HsALB_Pf-CSP(19-272)_L(AAY)_Pf-CSP(346-3 75)_L(AAY)_Pf-CSP(310-327)_L(AAY)_PADRE (opt5)
aggagaaagcuuaccaugaagugggugaccuucaucagccugcucuuucuguucuccucugccuacagccuuuuucaggaguaucaaugcuacggcuccucuagcaacacaagaguccugaaugaacucaacuaugacaaugcugggacgaaccuguacaaugagcuugaaaugaacuauuacggaaaacaggagaauugguauucccugaagaaaaacucucggagccucggcgaaaaugaugacgggaacaaugaggauaacgagaagcugcgcaaacccaagcacaagaaacugaagcagccugccgacggaaauccggaucccaacgcgaauccuaacguugaccccaacgcuaauccuaacguggaucccaaugccaacccuaauguggacccgaacgccaaucccaacgcuaauccuaacgccaaucccaacgcuaauccuaacgccaaucccaacgcgaacccgaaugccaacccuaaugcuaaccccaaugccaacccuaaugcuaaccccaaugccaaccccaaugcgaacccuaaugccaacccgaaugcuaaccccaacgccaauccuaacgcuaaucccaacgccaauccuaacgucgaucccaaugccaacccgaaugcuaacccuaaugcgaaccccaaugccaacccuaaugcuaaccccaacgccaauccuaacgccaaucccaacgcuaauccgaacgccaauccuaacgcgaaucccaacgcuaaucccaacgccaauccuaacgccaauccgaacgcuaaucccaacgccaacccuaaugcuaaccccaaugccaacccuaaugcgaaccccgccgcuuacauuaaaccuggcuccgccaauaagcccaaagacgaacucgauuacgcuaacgacaucgagaagaagauuuguaaaauggaaaagugcagcgccgcguaugagccgucugauaaacauaucaaggaguaccugaauaaaauucagaacucccuugccgcuuaugccaaguucguggcugccuggacccugaaagccgcugcgugaggacuaguuauaagacugacuagcccgaugggccucccaacgggcccuccuccccuccuugcaccgagauuaauaaaaaaaaaaaaaaaaaaaaaaaaaaaaaaaaaaaaaaaaaaaaaaaaaaaaaaaaaaaaaaaaugcaucccccccccccccccccccccccccccccccaaaggcucuuuucagagccaccagaauu

SEQ ID NO: 9135 - RNA, 1246 nt, Artificial Sequence
  mRNA Design i-3 (A64-N5-C30-hSL-N5) comprising derived and/or modified sequence from Pf(3D7)__XP_001351122.1__HsALB_Pf-CSP(19-272)_L(AAY)_Pf-CSP(310-3 27)_L(AAY)_Pf-CSP(346-375)_L(AAY)_PADRE (opt5)
aggagaaagcuuaccaugaagugggugaccuucaucagccugcucuuucuguucuccucugccuacagccuuuuucaggaguaucaaugcuacggcuccucuagcaacacaagaguccugaaugaacucaacuaugacaaugcugggacgaaccuguacaaugagcuugaaaugaacuauuacggaaaacaggagaauugguauucccugaagaaaaacucucggagccucggcgaaaaugaugacgggaacaaugaggauaacgagaagcugcgcaaacccaagcacaagaaacugaagcagccugccgacggaaauccggaucccaacgcgaauccuaacguugaccccaacgcuaauccuaacguggaucccaaugccaacccuaauguggacccgaacgccaaucccaacgcuaauccuaacgccaaucccaacgcuaauccuaacgccaaucccaacgcgaacccgaaugccaacccuaaugcuaaccccaaugccaacccuaaugcuaaccccaaugccaaccccaaugcgaacccuaaugccaacccgaaugcuaaccccaacgccaauccuaacgcuaaucccaacgccaauccuaacgucgaucccaaugccaacccgaaugcuaacccuaaugcgaaccccaaugccaacccuaaugcuaaccccaacgccaauccuaacgccaaucccaacgcuaauccgaacgccaauccuaacgcgaaucccaacgcuaaucccaacgccaauccuaacgccaauccgaacgcuaaucccaacgccaacccuaaugcuaaccccaaugccaacccuaaugcgaaccccgccgcuuacgaaccuuccgacaaacauauuaaggaguaccucaauaaaauccagaacagccuggccgcuuauauuaagcccggcucugccaauaagccgaaagaugaacuugacuacgcgaacgauaucgagaagaaaauuuguaagauggagaaaugcuccgccgcuuaugccaaguucguggcugccuggacccugaaagccgcugcgugaggacuaguuauaagacugacuagcccgaugggccucccaacgggcccuccuccccuccuugcaccgagauuaauaaaaaaaaaaaaaaaaaaaaaaaaaaaaaaaaaaaaaaaaaaaaaaaaaaaaaaaaaaaaaaaaugcaucccccccccccccccccccccccccccccccaaaggcucuuuucagagccaccagaauu

SEQ ID NO: 9136 - RNA, 1300 nt, Artificial Sequence
  mRNA Design i-3 (A64-N5-C30-hSL-N5) comprising derived and/or modified sequence from Pf(3D7)__XP_001351122.1__HsALB_Pf-CSP(19-272)_L(AAY)_Pf-CSP(310-3 27)_L(AAY)_Pf-CSP(346-375)_L(AAY)_PADRE_L(AAY)_P2 (opt5)
aggagaaagcuuaccaugaagugggugaccuucaucagccugcucuuucuguucuccucugccuacagccuuuuucaggaguaucaaugcuacggcuccucuagcaacacaagaguccugaaugaacucaacuaugacaaugcugggacgaaccuguacaaugagcuugaaaugaacuauuacggaaaacaggagaauugguauucccugaagaaaaacucucggagccucggcgaaaaugaugacgggaacaaugaggauaacgagaagcugcgcaaacccaagcacaagaaacugaagcagccugccgacggaaauccggaucccaacgcgaauccuaacguugaccccaacgcuaauccuaacguggaucccaaugccaacccuaauguggacccgaacgccaaucccaacgcuaauccuaacgccaaucccaacgcuaauccuaacgccaaucccaacgcgaacccgaaugccaacccuaaugcuaaccccaaugccaacccuaaugcuaaccccaaugccaaccccaaugcgaacccuaaugccaacccgaaugcuaaccccaacgccaauccuaacgcuaaucccaacgccaauccuaacgucgaucccaaugccaacccgaaugcuaacccuaaugcgaaccccaaugccaacccuaaugcuaaccccaacgccaauccuaacgccaaucccaacgcuaauccgaacgccaauccuaacgcgaaucccaacgcuaaucccaacgccaauccuaacgccaauccgaacgcuaaucccaacgccaacccuaaugcuaaccccaaugccaacccuaaugcgaaccccgccgcuuacgaaccuuccgacaaacauauuaaggaguaccucaauaaaauccagaacagccuggccgcuuauauuaagcccggcucugccaauaagccgaaagaugaacuugacuacgcgaacgauaucgagaagaaaauuuguaagauggagaaaugcuccgccgcuuaugccaaguucguggcugccuggacccugaaagccgcugcggccgcuuaccaauauaucaaggccaauagcaaguuuaucgggauuacagaacucugaggacuaguuauaagacugacuagcccgaugggccucccaacgggcccuccuccccuccuugcaccgagauuaauaaaaaaaaaaaaaaaaaaaaaaaaaaaaaaaaaaaaaaaaaaaaaaaaaaaaaaaaaaaaaaaaugcaucccccccccccccccccccccccccccccccaaaggcucuuuucagagccaccagaauu

SEQ ID NO: 9137 - RNA, 1264 nt, Artificial Sequence
  mRNA Design i-3 (A64-N5-C30-hSL-N5) comprising derived and/or modified sequence from Pf(3D7)__XP_001351122.1__HsALB_Pf-CSP(19-272)_L(AAY)_Pf-CSP(310-3 27)_Linker (AAY)_Pf-CSP(346-397) (opt5)
aggagaaagcuuaccaugaagugggugaccuucaucagccugcucuuucuguucuccucugccuacagccuuuuucaggaguaucaaugcuacggcuccucuagcaacacaagaguccugaaugaacucaacuaugacaaugcugggacgaaccuguacaaugagcuugaaaugaacuauuacggaaaacaggagaauugguauucccugaagaaaaacucucggagccucggcgaaaaugaugacgggaacaaugaggauaacgagaagcugcgcaaacccaagcacaagaaacugaagcagccugccgacggaaauccggaucccaacgcgaauccuaacguugaccccaacgcuaauccuaacguggaucccaaugccaacccuaauguggacccgaacgccaaucccaacgcuaauccuaacgccaaucccaacgcuaauccuaacgccaaucccaacgcgaacccgaaugccaacccuaaugcuaaccccaaugccaacccuaaugcuaaccccaaugccaaccccaaugcgaacccuaaugccaacccgaaugcuaaccccaacgccaauccuaacgcuaaucccaacgccaauccuaacgucgaucccaaugccaacccgaaugcuaacccuaaugcgaaccccaaugccaacccuaaugcuaaccccaacgccaauccuaacgccaaucccaacgcuaauccgaacgccaauccuaacgcgaaucccaacgcuaaucccaacgccaauccuaacgccaauccgaacgcuaaucccaacgccaacccuaaugcuaaccccaaugccaacccuaaugcgaaccccgccgcuuacgaaccuuccgacaaacauauuaaggaguaccucaauaaaauccagaacagccuggccgcuuauauuaagcccggcucugccaauaagccgaaagaugaacuugacuacgcgaacgauaucgagaagaaaauuuguaagauggagaaaugcuccagcguguucaauguugugaacucuuccaucgggcugaucaugguccucagcuuucuguuccuuaauugaggacuaguuauaagacugacuagcccgaugggccucccaacgggcccuccuccccuccuugcaccgagauuaauaaaaaaaaaaaaaaaaaaaaaaaaaaaaaaaaaaaaaaaaaaaaaaaaaaaaaaaaaaaaaaaaugcaucccccccccccccccccccccccccccccccaaaggcucuuuucagagccaccagaauu

SEQ ID NO: 9138 - RNA, 1864 nt, Artificial Sequence
  mRNA Design i-3 (A64-N5-C30-hSL-N5) comprising derived and/or modified sequence from Pf(3D7)__XP_001351122.1__LumSynt_L(GGS4-GGG)_Pf-CSP(19-397) (opt6)
aggagaaagcuuaccaugcaaauauacgaaggaaaacuaacagcagaaggauuacgauucggcauaguagcaucaagguucaaccacgcauuaguagauagacuaguagaaggagcaauagacgcaauaguccgacauggaggacgagaagaagauauaacacuagucagaguaccagggagcugggaaaucccaguagcagcaggagaacucgcaagaaaagaagauaucgacgccguaaucgcaaucgggguacuaauaagaggcgcaacaccccauuucgacuacauagcaagcgaaguaucaaaaggauuagcagaccuaaguuuagaacuaagaaaaccuauuacauucggcgucauaacggcagacacauuagaacaagccaucgaaagagcaggaacaaaacacggaaacaaaggcugggaagcagcacuaagcgcaauugaaauggcaaauuuauucaaaucccuaagaggcggcucagguggcaguggaggaucaggaggaucaggaggaggccuauuccaagaauaucaaugcuacggaucgagcucgaauacacgcguauuaaacgaauuaaacuacgacaacgcaggaacaaaccuauacaacgaacuagaaaugaacuauuauggaaaacaagagaacugguacucccuaaaaaaaaacagucgaagcuuaggagaaaaugacgacggaaauaacgaagacaacgaaaaacuaagaaaacccaaacauaaaaaauuaaaacaacccgcugacggaaacccagacccaaacgcuaacccgaacguugauccaaaugcaaacccaaauguggauccaaaugcaaaccccaacguagauccaaaugcaaacccaaacgcaaaccccaaugccaacccaaacgccaacccuaaugcuaauccaaacgcaaacccaaacgcaaacccgaacgcaaauccaaacgcaaacccuaaugcuaacccaaaugcaaauccaaacgcaaacccaaacgcuaacccaaacgcaaacccaaaugcaaacccaaaugcaaacccaaacgcaaauccaaacguagacccaaacgcaaauccaaacgcaaauccaaacgcaaacccaaacgccaaccccaaugcaaauccgaacgcaaacccaaacgcaaacccaaacgcaaacccaaacgcaaacccaaaugccaacccaaacgcaaacccgaacgcaaacccaaacgcaaacccaaacgcaaacccuaaugcgaacccaaaugccaacccaaacgcaaaccccaacgcuaacccaaacaaaaacaaucaaggaaacggacaagggcacaacaugccaaacgauccaaacagaaaugucgacgaaaacgccaaugcaaacagugccguaaaaaauaauaacaacgaagaaccuucagacaaacacauaaaagaauacuuaaacaaaauacaaaacucauuaucaaccgaauggagcccauguucuguuacaugcggaaauggaauacaaguaagaauaaaaccaggaucagcaaacaaaccaaaagacgaauuagacuacgcaaaugauauagaaaaaaaaauaugcaagauggaaaaaugcaguucuguauuuaacguaguaaacagcucaauaggucuaauaaugguacuauccuuucuuuuccugaacuaaggacuaguuauaagacugacuagcccgaugggccucccaacgggcccuccuccccuccuugcaccgagauuaauaaaaaaaaaaaaaaaaaaaaaaaaaaaaaaaaaaaaaaaaaaaaaaaaaaaaaaaaaaaaaaaaugcaucccccccccccccccccccccccccccccccaaaggcucuuuucagagccaccagaauu

SEQ ID NO: 9139 - RNA, 1726 nt, Artificial Sequence
  mRNA Design i-3 (A64-N5-C30-hSL-N5) comprising derived and/or modified sequence from Pf(3D7)__XP_001351122.1__HsALB_Pf-CSP(19-272)_L(PVTN)_HBsAg (opt6)
aggagaaagcuuaccaugaaauggguaaccuucaucucacuauuauucuuauuuucaucugcauacucacucuuccaagaauaccaaugcuacgguucaucuucuaacacaagaguacuaaacgaacuaaacuacgacaacgcaggaacaaaccucuauaacgaacuugaaaugaacuacuauggaaaacaagaaaacugguauucccuaaaaaaaaacucaagauccuuaggagaaaacgacgacggaaauaacgaagacaacgaaaaacuaagaaaaccaaaacacaaaaaacuaaaacaacccgcagacggaaacccagacccaaacgcaaacccaaacguagacccaaacgcaaacccaaacgucgacccaaacgccaauccaaacguagacccaaacgcuaacccaaacgccaauccaaacgcaaauccaaaugccaacccaaacgcaaacccaaaugcgaauccaaaugcaaaccccaaugcaaacccaaacgcaaauccaaacgcaaacccaaacgcaaacccuaacgcaaauccaaaugcaaacccuaacgcaaacccaaacgcaaauccaaacgcaaacccaaaugcaaauccaaacgucgacccaaacgcaaacccgaacgcaaacccaaacgcaaacccaaaugcaaauccaaaugcaaaccccaaugcaaacccaaacgcaaacccaaacgcuaacccaaaugcaaacccaaacgcaaacccaaacgcaaauccaaacgcaaacccaaacgcaaacccaaaugcaaacccaaacgcaaaccccaaugcaaauccaaacgcaaacccaaacgcaaacccacccguaaccaacauggaaaacaucacaucaggauuccuuggaccccucuuaguacuucaagcaggauucuuccuauuaacaagaauacuaacaauaccucaaucuuuagauucaugguggacuucauuaaauuuccuaggaggaagcccaguaugcuuaggacaaaacagccaaucaccaaccucaaaccacucaccaaccucaugcccaccaauaugcccaggauaccgauggaugugccuaagaagauucauaauauucuuauucauacuacuacuaugccucauauucuuacuaguacuauuagacuaccaaggaaugcugccagucugcccacuuauaccagguagcaccaccacuaacacaggaccuugcaaaacaugcacaacacccgcucaaggaaauucuauguuuccaucaugcugcugcacuaaacccacagauggcaauuguacaugcauaccaauccccucaucaugggcauuugccaaauacuuaugggaaugggcaucuguaagauucucuuggcuaucacucuuaguaccauucguacaaugguucguaggccuauccccuacaguauggcuauccgcaauauggaugaugugguacuggggaccaucacuauacucaauagucucacccuucauaccacuauuaccaauauucuucugccuauggguauauauauaaggacuaguuauaagacugacuagcccgaugggccucccaacgggcccuccuccccuccuugcaccgagauuaauaaaaaaaaaaaaaaaaaaaaaaaaaaaaaaaaaaaaaaaaaaaaaaaaaaaaaaaaaaaaaaaaugcaucccccccccccccccccccccccccccccccaaaggcucuuuucagagccaccagaauu

SEQ ID NO: 9140 - RNA, 1843 nt, Artificial Sequence
  mRNA Design i-3 (A64-N5-C30-hSL-N5) comprising derived and/or modified sequence from Pf(3D7)__XP_001351122.1__HsALB_Pf-CSP(19-272)_L(AAY)_Pf-CSP(346-3 65)_L(AAY)_PADRE_L(PVTN)_HBsAg (opt6)
aggagaaagcuuaccaugaaaugggucaccuucauuuccuuauuauucuuauuuucguccgcauacucacuauuucaagaauaucaauguuacggaucaagcucaaacacccgcguacucaacgaacuaaacuacgacaacgcaggaacaaaccuauauaacgaacuagaaaugaauuauuacggaaaacaagaaaacugguauucacuuaaaaaaaacuccagaucccuuggcgaaaacgacgacggaaauaaugaagacaacgaaaaacuuagaaaaccaaaacauaaaaaacuaaaacaaccugcagacgguaacccagauccaaaugcuaacccaaauguagacccuaacgcuaacccaaacguagauccaaacgccaacccaaacguagauccaaacgcaaacccaaacgcaaauccaaaugcaaacccaaacgccaaccccaacgcaaacccaaaugcaaauccuaaugcaaaucccaacgcaaauccaaacgcaaauccaaaugcaaaccccaacgcaaacccaaaugcaaauccaaaugcaaauccaaaugcaaacccaaacgcaaacccaaaugcaaauccuaacgcaaacccaaacgucgaccccaacgcaaauccaaacgcaaacccaaacgcaaaccccaaugcaaacccaaaugcaaacccaaacgcaaacccaaacgcaaaccccaacgcaaauccaaacgcaaauccaaaugcaaauccaaacgcaaaccccaaugcaaaccccaaugcuaacccaaacgccaaucccaacgcaaacccaaacgcaaaucccaacgcaaauccaaacgcaaacccugcagcauacauaaaacccggcucugcuaauaaacccaaagaugaacucgacuaugccaacgacauagaagcagccuacgcaaaauucguagcugcauggacauuaaaagcagcagcaccagugacaaacauggaaaacauuacaucaggauucuuagguccauuauuaguccuccaagcaggauucuucuuacuaacuagaauauuaacaauaccacaaucccuagacucuugguggacuucacuaaauuuccuaggaggauccccaguaugucucggucaaaauucucaaucaccuacaucaaaccauucaccaacaagcugccccccaaucugucccggauacagauggaugugccuacgcagauucauuauauuucuauucauacuacuucuaugccuaauauuccuacuaguccuucuagacuaccaaggaaugcuacccguaugcccacuuauaccaggauccacaacaacaaacacagguccaugcaaaacaugcacaacaccagcccaagguaauucuauguucccaucaugcuguugcacaaaaccaacagacgguaacugcacaugcaucccaauacccucaucaugggcauucgcaaaauaccuaugggaaugggcuucaguaagauucuccugguuaucccuuuuagucccauucguacaaugguucguaggauuaucacccacuguauggcuaucagcaauauggaugaugugguauuggggcccaucucuuuacucaaucgucuccccuuuuauuccacuacuacccauauuuuucugccuauggguauacauuuaaggacuaguuauaagacugacuagcccgaugggccucccaacgggcccuccuccccuccuugcaccgagauuaauaaaaaaaaaaaaaaaaaaaaaaaaaaaaaaaaaaaaaaaaaaaaaaaaaaaaaaaaaaaaaaaaugcaucccccccccccccccccccccccccccccccaaaggcucuuuucagagccaccagaauu

SEQ ID NO: 9141 - RNA, 2062 nt, Artificial Sequence
  mRNA Design i-3 (A64-N5-C30-hSL-N5) comprising derived and/or modified sequence from Pf(3D7)__XP_001351122.1__HsALB_Pf-CSP(19-384)_L(PVTN)_HBsAg (opt6)
aggagaaagcuuaccaugaaauggguaaccuucauaucucucuuauuccuuuuuucaucugcauauucacuauuucaagaauaucaauguuauggaucaucaucaaacacccgaguacucaacgaauuaaauuacgacaacgcagguacuaacuuauacaacgaauuagaaaugaauuacuauggaaaacaagaaaacugguauucccucaaaaaaaacucucgaucucuaggcgaaaacgacgacggcaacaacgaagacaacgaaaaacuacguaaacccaaacacaaaaaacuaaaacaaccagcagauggaaacccagacccaaacgcaaacccaaacguagacccaaacgcaaauccaaacguagacccgaacgcaaauccaaauguagaucccaaugcuaauccaaaugccaacccaaacgcaaacccuaacgcuaaucccaacgcaaacccaaacgcaaacccaaaugcaaacccaaacgcaaaccccaacgcaaacccaaaugcaaauccaaaugcaaauccaaacgccaacccaaaugccaacccaaacgcaaauccaaacgcuaaccccaacgcaaaccccaacgccaaucccaacguagaccccaacgcaaacccaaaugcaaauccaaacgcaaaccccaaugcaaacccaaacgcuaacccuaaugcaaacccaaacgccaacccaaaugcaaaccccaacgccaacccaaacgcaaauccaaacgcaaacccaaacgcuaacccaaacgccaacccaaacgcaaacccaaacgcuaacccaaacgcaaacccaaaugcaaacccaaaugcuaauccaaauaaaaacaaccaaggaaacggccaaggacauaauaugccuaacgacccaaacagaaacguagacgaaaaugcaaacgcaaacuccgcaguaaaaaauaacaauaacgaagaacccuccgacaaacauauaaaagaauaucuaaacaaaauacaaaauucacucucuacugaaugguccccaugcucaguaacauguggaaacggaauccaaguacgcauaaaaccaggaucagcaaacaaaccaaaagacgaacuagacuacgcaaacgauauagaaaaaaaaauaugcaaaauggaaaaaugcuccuccguauucaacguagucaauucaucuccaguaaccaauauggaaaauauaaccuccggauuccuaggaccacuacucguuuuacaagcaggauucuucuuacuaacaagaauacucacuauaccacaaucccuggauucuugguggacaucccuaaauuucuuaggcggaucacccguaugccuaggccaaaauagccaaaguccaacuucaaaccacuccccaacuucuugcccaccaauaugccccggcuacagauggaugugccuucgacgauucauaauauuucuauucauacuauuacuaugucuaauauuccuacucguucuauuagacuaccaaggaauguuaccaguuugcccacuaauaccugguucaacaaccacuaacacuggucccugcaaaacauguaccaccccagcccaaggaaacucaauguuccccucaugcuguugcacaaaaccaaccgacggaaauugcacaugcauacccauaccaucuucuugggcauuugcuaaauaucuaugggaaugggcaucaguacgcuucucauggcuaucucuacuaguaccauucguccaaugguucguaggccuaucaccaacaguauggcuaucugcaauauggaugaugugguacuggggucccuccuuauauucaauuguaucaccuuuuaucccacuccuacccauauucuucuguuuauggguauacauauaaggacuaguuauaagacugacuagcccgaugggccucccaacgggcccuccuccccuccuugcaccgagauuaauaaaaaaaaaaaaaaaaaaaaaaaaaaaaaaaaaaaaaaaaaaaaaaaaaaaaaaaaaaaaaaaaugcaucccccccccccccccccccccccccccccccaaaggcucuuuucagagccaccagaauu

SEQ ID NO: 9142 - RNA, 1879 nt, Artificial Sequence
  mRNA Design i-3 (A64-N5-C30-hSL-N5) comprising derived and/or modified sequence from Pf(3D7)__XP_001351122.1__HsALB_Pf-CSP(19-384)_L(SGG)_Ferritin (opt6)
aggagaaagcuuaccaugaaauggguaacauuuauaucucuauuauucuuauucuccucagcauacucacucuuucaagaauaccaaugcuacgguucuucauccaacacacgaguccuaaacgaauuaaacuacgacaaugcaggaaccaaucuauacaaugaacuugaaaugaacuacuacggaaaacaagaaaacugguacucccuaaaaaaaaacucacgaagccuaggagaaaaugacgacggaaacaacgaagacaacgaaaaacuacgaaaacccaaacacaaaaaacuaaaacaacccgccgacggcaauccagauccaaacgcaaacccaaacguagaccccaacgccaacccaaacguagauccaaacgcaaauccaaauguugauccaaaugcaaaccccaacgcaaacccaaacgcaaacccaaacgcaaacccaaacgcaaacccaaacgcaaauccaaaugcaaaucccaacgcaaauccaaacgcaaauccaaaugcaaacccaaacgcuaaucccaacgcuaacccaaacgcaaacccaaacgcaaacccgaacgcuaacccaaacgcaaacccaaacgcaaaccccaacguagacccaaacgcaaacccaaacgcaaaccccaacgcaaacccaaacgcaaacccaaacgcaaaccccaacgcaaaccccaacgcaaacccaaacgccaaccccaaugcaaacccaaacgccaacccaaacgcaaacccaaacgcaaacccaaacgcaaacccaaacgcaaauccaaacgcaaacccaaacgcaaacccaaacgcaaacccaaaugcaaacccaaacaaaaacaaccaaggaaauggacaaggacacaacaugccaaacgacccaaaccguaacguagaugaaaaugccaacgcaaacucagccguaaaaaacaacaacaacgaagaaccuucagacaaacacauaaaagaauacuuaaacaaaauacaaaacucauuaucaacugaauggucccccuguucagucacaugcggaaauggaauacaaguaagaauuaaaccagguucagccaacaaaccaaaagacgaacuagacuacgcaaacgacauugaaaaaaaaauauguaaaauggaaaaauguaguucagucuucaacguaguaaacucaucauccggaggauuauccaaagacauaauaaaacucuuaaaugaacaaguaaacaaagaaaugaacucgagcaaccucuauaugucaaugucauccuggugcuacacccauucccuagacggcgccggacuauuccuguucgaccaugcagcagaagaauaugaacacgcaaaaaagcuaaucaucuucuuaaacgaaaacaaugucccaguacaacuaaccuccauaucagcaccugaacauaaauucgaaggacuaacacaaauauuucaaaaagcauacgaacacgaacaacacauaucagaaucaauuaauaacauaguagaccacgcaaucaaaagcaaggaccacgcaacauucaacuuucuacaaugguacguagcagaacaacaugaagaagaaguacucuucaaagacaucuuagacaaaauugaacucauaggaaacgaaaaucacggacucuaccucgcagaccaguacguaaaaggaaucgcaaaaucacguaaaagcuaaggacuaguuauaagacugacuagcccgaugggccucccaacgggcccuccuccccuccuugcaccgagauuaauaaaaaaaaaaaaaaaaaaaaaaaaaaaaaaaaaaaaaaaaaaaaaaaaaaaaaaaaaaaaaaaaugcaucccccccccccccccccccccccccccccccaaaggcucuuuucagagccaccagaauu

SEQ ID NO: 9143 - RNA, 1840 nt, Artificial Sequence
  mRNA Design i-3 (A64-N5-C30-hSL-N5) comprising derived and/or modified sequence from Pf(3D7)__XP_001351122.1__HsALB_Pf-CSP(93-384)_L(PVTN)_HBsAg (opt6)
aggagaaagcuuaccaugaaauggguaacuuuuauaucccuccuauuucuauuuucaucagccuauucaaaacuaaaacaacccgcagauggaaaucccgacccaaaugcaaauccaaauguagauccaaacgccaacccaaaugucgacccaaaugcaaacccaaacguagauccuaacgcaaacccaaaugcuaauccaaacgcuaacccaaacgcaaauccaaaugcuaacccaaacgcaaacccuaacgcaaacccaaacgcuaacccaaacgcaaacccaaacgccaacccaaacgcaaaccccaacgcaaacccuaacgcaaacccaaacgcaaacccaaaugccaacccaaacgcaaacccaaacgcaaacccaaacguagaccccaacgcuaauccaaaugcaaauccaaacgcaaacccaaaugccaacccaaacgccaacccuaaugcaaacccaaacgcaaacccaaaugcaaaccccaacgcaaauccaaacgcaaauccaaaugcaaacccaaacgcuaacccaaacgcaaaccccaaugcaaacccaaacgcaaauccaaaugcaaacccaaaugcaaauccaaaugcaaacccaaauaaaaacaaccaaggaaacggacaaggccauaacaugccaaacgacccaaaccgcaacgucgaugaaaacgccaacgcaaauucagcgguuaaaaacaacaacaaugaagaacccucagacaaacacauaaaagaauacuuaaacaaaauacaaaacucacuaucgacagaaugguccccaugcuccguaaccugcgguaauggaauacaagucagaauaaaaccaggaucagcuaauaaaccaaaagacgaauuagacuacgcaaacgacauagaaaagaaaauaugcaaaauggaaaaauguucuucaguauuuaacguagucaacucaucacccguaacuaacauggaaaacauaaccucaggauuucuagguccuuuacucguacuacaagcaggauuuuuccuacuuacccgaauccuaacaauaccucaaucucuagacucaugguggacaucccuaaauuucuuaggcggaucaccaguuugccucggacaaaacucucaaucaccaacuucaaaucacuccccaacaucuugcccaccaauaugcccaggauaucgauggaugugucuacgacguuuuauaauauuucuauuuauacuacuacucugucuaauauuccuauuaguacuacucgacuaucaaggaaugcuccccgucuguccccucauacccggaucaacaacuacaaacaccggaccgugcaaaaccugcacaaccccagcucaaggaaauucaauguucccaucaugcugcuguacaaaaccaacagauggaaacugcacaugcauaccaaucccaucaagcugggccuuugccaaauauuuaugggaaugggccuccgucagauucucauggcucucccuucuaguuccauucguacaaugguuuguaggccuauccccaaccguauggcuauccgccauauggaugaugugguauuggggaccaucacuauacucaauaguauccccauucauaccacuccuacccauauucuuuugccuauggguauacauuuaaggacuaguuauaagacugacuagcccgaugggccucccaacgggcccuccuccccuccuugcaccgagauuaauaaaaaaaaaaaaaaaaaaaaaaaaaaaaaaaaaaaaaaaaaaaaaaaaaaaaaaaaaaaaaaaaugcaucccccccccccccccccccccccccccccccaaaggcucuuuucagagccaccagaauu

SEQ ID NO: 9144 - RNA, 1501 nt, Artificial Sequence
  mRNA Design i-3 (A64-N5-C30-hSL-N5) comprising derived and/or modified sequence from Pf(3D7)__XP_001351122.1__HsALB_Pf-CSP(199-377)_L(PVTN)_HBsAg (opt6)
aggagaaagcuuaccaugaaauggguaacauucauaucauuacucuucuuauuuuccucugcauacucagauccaaaugcaaacccaaaugcaaacccaaacgcaaacccaaaugccaauccaaaugcaaacccaaaugcaaacccaaacgcaaacccaaacgcaaacccaaacgcaaacccuaaugcaaacccaaaugcaaauccaaacgcuaacccaaacgcaaacccaaaugccaacccaaacgccaauccaaacgcaaacccaaacgcaaaucccaaugcaaacccuaacaaaaacaaucaaggaaacggacaaggccacaacaugccaaaugacccaaaccgcaauguagacgaaaaugccaacgcaaacuccgcuguaaaaaacaauaacaacgaagaaccuuccgauaaacauauaaaagaauacuuaaauaaaauacaaaauucauuaucaacagaauggucaccaugcucagucacaugcggaaauggaauacaaguaagaauaaaacccgguuccgcaaacaaaccaaaagacgaacuagacuacgcaaaugacaucgaaaaaaaaauaugcaaaauggaaaaauguucuucaguaccaguaacaaacauggaaaacaucaccucuggauuccuaggaccacuauuaguacuacaagcaggauucuuccuccuaacaagaauauuaacaauaccacaaucacuugacucaugguggacaucccucaauuuccuaggaggauccccaguaugucuaggucaaaacucucaaucuccaacauccaaccauucacccacaucaugcccucccauaugcccaggauaccgauggaugugccucagaagauucauaauauuccuauucauauuacuccuauguuuaaucuuucuacuagucuuauuagacuaccaaggaaugcuaccaguaugcccacuaaucccaggauccacaacaacaaacacaggccccugcaaaacauguacaacaccagcacaaggaaacucaauguucccaucaugcuguugcacaaaaccaacagacggaaacugcacaugcaucccaauaccaucaucuugggcauuugcaaaauacuuaugggaaugggcaucaguacgcuuuucauggcucucccuccucguaccauucguccaaugguucguaggucuaucaccaacaguuuggcuauccgcuauauggaugaugugguauuggggcccuucccuauacucaauaguuucaccauuuauaccacuccuaccaauauuuuucugccuuuggguauacauauaaggacuaguuauaagacugacuagcccgaugggccucccaacgggcccuccuccccuccuugcaccgagauuaauaaaaaaaaaaaaaaaaaaaaaaaaaaaaaaaaaaaaaaaaaaaaaaaaaaaaaaaaaaaaaaaaugcaucccccccccccccccccccccccccccccccaaaggcucuuuucagagccaccagaauu

SEQ ID NO: 9145 - RNA, 1198 nt, Artificial Sequence
  mRNA Design i-3 (A64-N5-C30-hSL-N5) comprising derived and/or modified sequence from Pf(3D7)__XP_001351122.1__HsALB_Pf-CSP(19-272)_L(AAY)_Pf-CSP(346-3 75)_L(AAY)_Pf-CSP(310-327) (opt6)
aggagaaagcuuaccaugaaauggguaaccuucauuucacuucucuuccuauucuccagcgcauacucacucuuccaagaauaccaaugcuacggcucaaguuccaacacacgaguacuaaacgaauuaaacuacgacaaugcuggaaccaaccuauacaacgaacucgaaaugaacuacuacgguaaacaagaaaacugguauucacuaaaaaaaaacucaaggucccuaggagaaaacgacgacggaaacaacgaagacaacgaaaaauuaagaaaaccaaaacacaaaaaacuaaaacaacccgcagacggaaaccccgacccaaacgcaaacccaaacguagauccaaacgcaaacccaaacguagacccaaacgcaaacccaaacguagacccaaacgcaaacccuaaugcaaacccaaacgcaaacccaaacgcaaacccaaacgcaaacccaaacgcaaacccaaacgcaaaccccaacgccaacccaaacgcaaacccaaacgcaaacccaaacgcaaacccaaacgcaaacccaaacgcaaacccaaacgcaaacccaaacgcaaacccaaaugcaaacccaaacgcaaacccaaacguagacccaaacgcaaacccaaacgcaaacccaaaugcaaacccaaacgcaaacccaaacgcaaacccaaacgcuaacccaaacgcaaacccaaacgcuaauccaaaugcuaaccccaacgcaaacccaaaugcaaacccaaacgcuaauccaaaugcaaauccaaacgcaaacccaaacgcaaacccaaacgcaaacccaaacgcaaacccaaacgcaaauccagccgcauacauaaaacccggcucagcaaacaaaccaaaagacgaacuagacuacgccaacgacauagaaaaaaaaauaugcaaaauggaaaaaugcucagccgcauacgaaccaucagacaaacacaucaaagaauacuuaaacaaaauacaaaacagcuuauaaggacuaguuauaagacugacuagcccgaugggccucccaacgggcccuccuccccuccuugcaccgagauuaauaaaaaaaaaaaaaaaaaaaaaaaaaaaaaaaaaaaaaaaaaaaaaaaaaaaaaaaaaaaaaaaaugcaucccccccccccccccccccccccccccccccaaaggcucuuuucagagccaccagaauu

SEQ ID NO: 9146 - RNA, 1246 nt, Artificial Sequence
  mRNA Design i-3 (A64-N5-C30-hSL-N5) comprising derived and/or modified sequence from Pf(3D7)__XP_001351122.1__HsALB_Pf-CSP(19-272)_L(AAY)_Pf-CSP(346-3 75)_L(AAY)_Pf-CSP(310-327)_L(AAY)_PADRE (opt6)
aggagaaagcuuaccaugaaauggguaacauucauaucacuacuauuccuauucucauccgccuacucacucuuucaagaauaucaaugcuacggaucaagcucaaauacaagaguacuaaacgaacuaaacuacgacaacgcaggaaccaaccuauacaacgaacuagaaaugaacuacuacggaaaacaagaaaacugguacucacuuaaaaaaaacucaagaucacuaggagaaaacgacgacggaaacaacgaagacaacgaaaaacuacgaaaaccaaaacauaaaaaacuaaaacaaccagcagacggaaacccagacccaaacgcaaauccaaacguagacccaaaugcaaacccaaacguagacccaaacgcaaacccaaacguagacccaaaugcaaacccaaacgcaaauccaaacgcaaacccaaacgcaaacccaaacgcaaacccaaacgcaaacccaaacgcaaacccaaaugcaaauccaaacgcaaacccaaaugcaaacccaaacgcaaacccaaacgcgaacccaaacgccaaccccaacgcaaacccaaacgcaaauccaaaugcaaacccaaacgccaauccaaacguagacccaaacgcaaauccaaacgcaaacccaaacgcaaacccaaacgcaaacccuaacgcaaacccaaacgcaaacccaaacgcaaacccaaacgccaacccaaacgcaaaccccaacgcaaacccaaacgcaaacccaaacgcaaaccccaacgcaaauccaaacgcuaacccaaacgcuaaccccaacgcaaacccaaaugcaaacccaaacgccaacccagccgcauacauaaaaccaggaucagcaaauaaaccaaaagacgaacuagacuacgcaaacgacauagaaaaaaaaauaugcaaaauggaaaaaugcuccgcagcauacgaaccaucagacaaacacaucaaagaauaccuaaacaaaauccaaaacucacuagccgccuacgcaaaauuugucgcagcauggacacucaaagcagcagcauaaggacuaguuauaagacugacuagcccgaugggccucccaacgggcccuccuccccuccuugcaccgagauuaauaaaaaaaaaaaaaaaaaaaaaaaaaaaaaaaaaaaaaaaaaaaaaaaaaaaaaaaaaaaaaaaaugcaucccccccccccccccccccccccccccccccaaaggcucuuuucagagccaccagaauu

SEQ ID NO: 9147 - RNA, 1246 nt, Artificial Sequence
  mRNA Design i-3 (A64-N5-C30-hSL-N5) comprising derived and/or modified sequence from Pf(3D7)__XP_001351122.1__HsALB_Pf-CSP(19-272)_L(AAY)_Pf-CSP(310-3 27)_L(AAY)_Pf-CSP(346-375)_L(AAY)_PADRE (opt6)
aggagaaagcuuaccaugaaauggguaaccuucauaucccuacuauuucuauucuccucagcauacucacuauuccaagaauaccaaugcuacggcucaucaucaaacacaagaguacuaaaugaacuaaacuacgacaacgccggaaccaaccuauacaaugaacucgaaaugaauuacuacggaaaacaagaaaacugguacucacuaaaaaaaaacucaagaagccuaggagaaaacgacgacggaaacaacgaagacaacgaaaaauuacgaaaaccaaaacauaaaaaacuaaaacaacccgccgacggaaacccagacccaaacgcaaacccaaacguagacccaaacgcaaauccaaacguagacccaaacgcaaauccaaauguagacccaaacgcaaacccaaacgcaaacccaaacgcaaacccaaacgcaaacccgaacgcaaauccaaacgcaaacccaaacgcaaacccaaacgcaaacccaaacgcaaacccaaacgcaaaccccaacgcaaacccaaaugcaaacccaaacgcaaacccaaaugcaaauccaaacgcaaacccaaacgcaaacccaaacgcaaacccaaacguagacccaaaugcaaaccccaacgcaaacccaaacgcaaacccaaacgcaaacccaaacgcaaacccaaacgcaaacccaaacgcaaacccaaacgcaaacccaaacgccaauccaaacgcaaauccaaacgcaaacccaaacgcaaacccaaacgcaaacccaaacgcaaacccaaacgcaaacccaaacgcaaacccaaaugcaaacccaaacgcaaacccagcagcauacgaaccuucagacaaacacauaaaagaauacuuaaacaaaauacaaaacucacuagcagccuacaucaaaccaggauccgcaaacaaaccaaaagacgaacuagacuacgcaaacgacauagaaaaaaaaauauguaaaauggaaaaaugcucagccgcauaugcuaaauucgucgcagcauggaccuuaaaagcagcagcauaaggacuaguuauaagacugacuagcccgaugggccucccaacgggcccuccuccccuccuugcaccgagauuaauaaaaaaaaaaaaaaaaaaaaaaaaaaaaaaaaaaaaaaaaaaaaaaaaaaaaaaaaaaaaaaaaugcaucccccccccccccccccccccccccccccccaaaggcucuuuucagagccaccagaauu

SEQ ID NO: 9148 - RNA, 1300 nt, Artificial Sequence
  mRNA Design i-3 (A64-N5-C30-hSL-N5) comprising derived and/or modified sequence from Pf(3D7)__XP_001351122.1__HsALB_Pf-CSP(19-272)_L(AAY)_Pf-CSP(310-3 27)_L(AAY)_Pf-CSP(346-375)_L(AAY)_PADRE_L(AAY)_P2 (opt6)
aggagaaagcuuaccaugaaaugggucaccuucaucucacuacuauuuuuauucuccagcgcauacucauuauuccaagaauaccaaugcuauggcucaagcucaaacacaagaguauuaaacgaacuaaacuacgauaacgccggaacaaaccuauacaacgaacucgaaaugaacuacuauggaaaacaagaaaacugguacucacuuaaaaaaaauucaagaucucuaggagaaaacgacgacggaaacaaugaagacaacgagaaauuaagaaaaccaaaacacaaaaaacuaaaacaaccagcagacggaaacccagacccaaacgcaaacccaaacguagacccaaacgcaaacccaaacguagacccaaacgcaaacccaaacguagauccgaacgcaaauccaaacgcaaauccaaacgcaaacccaaaugcaaacccaaaugcaaacccaaaugcaaacccaaacgcaaacccaaacgcaaacccaaacgcaaaccccaacgcaaacccaaacgcaaauccaaacgcaaacccaaacgcaaacccaaacgcaaaccccaacgcaaacccaaacgcaaacccgaacgcgaacccaaacguggauccaaacgcaaacccaaaugcaaaucccaacgcaaacccaaaugcaaacccaaacgcaaacccaaacgcaaacccaaacgcaaacccaaaugcaaacccaaacgcaaacccaaacgcaaacccaaacgcaaacccaaacgcaaauccaaacgcaaauccaaaugcaaacccaaacgcaaacccaaacgcaaaccccaacgcaaauccaaacgcaaacccagccgcauacgaaccaucagacaaacauauaaaagaauaucuaaacaaaauucaaaacucacucgcagcauacauaaaaccaggaagcgcaaacaaaccuaaagacgaacuagacuacgcaaacgacauagaaaaaaaaauaugcaaaauggaaaaaugcucagcagcguacgcaaaauucguagcagcauggacacuaaaagcagcagccgcagcauaccaauacauaaaagcaaauucaaaauucaucggaauuacagaacuauaaggacuaguuauaagacugacuagcccgaugggccucccaacgggcccuccuccccuccuugcaccgagauuaauaaaaaaaaaaaaaaaaaaaaaaaaaaaaaaaaaaaaaaaaaaaaaaaaaaaaaaaaaaaaaaaaugcaucccccccccccccccccccccccccccccccaaaggcucuuuucagagccaccagaauu

SEQ ID NO: 9149 - RNA, 1264 nt, Artificial Sequence
  mRNA Design i-3 (A64-N5-C30-hSL-N5) comprising derived and/or modified sequence from Pf(3D7)__XP_001351122.1__HsALB_Pf-CSP(19-272)_L(AAY)_Pf-CSP(310-3 27)_Linker (AAY)_Pf-CSP(346-397) (opt6)
aggagaaagcuuaccaugaaauggguuacauucauaucauuacuauuccucuuuuccucagcauacucacucuuucaagaauaccaaugcuacggcucauccucaaacacaagaguacucaacgaacucaacuaugacaacgcaggaacaaaccucuacaacgaacuugaaaugaauuacuauggaaaacaagaaaacugguacucauuaaaaaaaaacucaagauccuuaggcgaaaacgacgacggaaacaacgaagacaacgagaaacuccgaaaaccaaaacacaaaaaacuaaaacaaccagcagacggaaacccagacccaaacgcaaacccaaacguagacccaaacgcaaacccaaacguagacccaaacgcaaacccaaacguagacccaaacgcaaacccaaacgcaaacccaaacgcaaacccaaacgcaaacccaaacgcaaacccaaacgcaaacccaaacgcaaacccaaacgcaaacccaaacgcaaacccaaacgcaaacccaaacgccaacccaaacgcaaacccaaacgccaacccaaacgcaaacccaaacgcaaacccaaacgcaaauccaaacgccaacccaaacguagacccaaacgcaaacccaaacgcaaacccaaacgcaaacccaaacgcaaaccccaacgccaacccaaacgccaaccccaacgcaaauccaaacgcaaacccaaacgcaaaccccaacgcaaacccaaacgcaaacccaaacgcaaacccaaacgcuaacccaaacgcaaaccccaacgcaaauccaaacgcaaacccaaacgcaaacccaaaugcaaacccagcagcauaugaaccuucagauaaacacauaaaagaauaccuaaacaaaauccaaaacucucucgcagccuacaucaaaccaggaucagcaaacaaacccaaagacgaacuagacuacgcaaaugauaucgaaaaaaaaauaugcaaaauggaaaaaugcucgagcguauuuaacguaguaaacucaucaaucggacucauaaugguacuaucauuucuauuccucaacuaaggacuaguuauaagacugacuagcccgaugggccucccaacgggcccuccuccccuccuugcaccgagauuaauaaaaaaaaaaaaaaaaaaaaaaaaaaaaaaaaaaaaaaaaaaaaaaaaaaaaaaaaaaaaaaaaugcaucccccccccccccccccccccccccccccccaaaggcucuuuucagagccaccagaauu

SEQ ID NO: 9150 - RNA, 1864 nt, Artificial Sequence
  mRNA Design i-3 (A64-N5-C30-hSL-N5) comprising derived and/or modified sequence from Pf(3D7)__XP_001351122.1__LumSynt_L(GGS4-GGG)_Pf-CSP(19-397) (opt11)
aggagaaagcuuaccaugcaaauauacgagggcaaacucacggcugaaggccuacgcuuuggcaucgucgcaucacgguucaaucacgcacucguggacaggcucguagaaggugccaucgacgcaauaguacgccacggcgggcgcgaagaggacauaacgcuaguacgcguacccggaagcugggaaauccccguagccgcaggcgaacucgcacgcaaagaagacaucgacgccgugaucgcaauaggaguccugauccgaggcgcaacaccacacuucgacuacaucgccuccgaagucucaaaaggccuagcggaucugagccucgaacugcgcaaaccuauaacauucggcgucauaacagccgacacauuagaacaggccauagaaagagccggaaccaaacauggaaacaaaggcugggaagcggcccuaagcgccaucgaaauggcaaaccucuucaaaagccugcgcggaggaucaggcggcagcggcggcuccggaggaagcggcggcggucuuuuucaagaauaccaaugcuacggcuccucaucgaacacacgcguacucaaugaacugaacuacgacaaugcaggaaccaaccucuacaacgaacucgagaugaacuacuacggcaaacaagaaaacugguacucgcuaaagaaaaacuccagaucccugggcgaaaacgacgacggaaacaacgaagacaacgaaaaacuacgcaaaccaaaacacaagaaacuaaaacaaccagcagacggaaacccagacccaaacgcgaacccaaacgucgacccaaacgcaaacccaaacguagacccaaacgcaaacccaaacgucgaccccaacgcaaacccaaacgccaaccccaacgcaaaccccaacgcgaacccaaacgcgaaccccaacgcaaacccaaacgcaaaccccaacgcaaacccaaacgcaaacccaaacgccaacccgaaugccaacccgaacgcaaacccgaacgcaaaccccaacgcgaaccccaacgcaaacccaaaugccaaccccaacgcaaaccccaacguagacccgaacgcaaacccgaacgcaaacccgaacgcaaacccaaacgcaaacccaaacgccaaccccaacgccaacccaaacgcgaacccaaaugcaaaccccaacgccaacccgaacgccaacccaaacgcaaacccgaacgcaaaccccaacgcaaaccccaacgcaaaccccaacgcaaacccgaacgccaacccaaacgcaaacccaaacgcaaacccaaacaaaaacaaccaaggaaacgggcaaggccacaacaugcccaacgacccaaaccgaaauguagaugaaaacgcaaacgccaacagcgcggucaaaaacaacaacaacgaagaacccucggacaaacacauaaaagaauaccuaaacaaaauccagaacucccucucaacagaauggucccccugcucaguuaccugcgguaaugguauacaaguccgcauuaaaccgggaucugccaacaaaccaaaagaugagcuagacuacgccaacgacauagaaaagaaaaucugcaaaauggagaaaugcuccucagucuucaacguaguaaacagcucgauagggcucaucaugguacucuccuuuuuauuccucaacuaaggacuaguuauaagacugacuagcccgaugggccucccaacgggcccuccuccccuccuugcaccgagauuaauaaaaaaaaaaaaaaaaaaaaaaaaaaaaaaaaaaaaaaaaaaaaaaaaaaaaaaaaaaaaaaaaugcaucccccccccccccccccccccccccccccccaaaggcucuuuucagagccaccagaauu

SEQ ID NO: 9151 - RNA, 1726 nt, Artificial Sequence
  mRNA Design i-3 (A64-N5-C30-hSL-N5) comprising derived and/or modified sequence from Pf(3D7)__XP_001351122.1__HsALB_Pf-CSP(19-272)_L(PVTN)_HBsAg (opt11)
aggagaaagcuuaccaugaaaugggucaccuucaucucccuccucuuccucuucuccucugccuacucacucuuccaagaauaccaaugcuacggcuccucuuccaacacccgcguacucaacgaacucaacuaugacaaugcaggaaccaaccuauacaacgagcuagagaugaacuacuacggcaaacaagaaaacugguacucccucaagaaaaacucacgcucccuuggcgaaaaugacgacggcaacaacgaagacaacgaaaaacuucgcaaacccaaacacaagaaauuaaaacaaccagccgacggcaacccagaccccaacgccaaccccaacgucgaccccaacgccaacccuaacgucgaccccaacgcaaacccuaacgucgauccaaacgccaaccccaacgcuaaccccaacgcaaauccgaacgcaaaccccaacgccaacccuaacgccaaccccaacgccaacccaaacgccaaccccaacgcuaaccccaacgcaaacccgaacgccaaccccaacgccaaccccaacgcaaaccccaacgccaaccccaaugcaaaccccaacgccaacccaaaugccaaccccaacgucgaccccaacgcaaaccccaacgcuaacccuaacgcuaacccaaacgccaacccaaacgcuaaccccaacgccaaccccaacgccaaccccaacgcaaacccaaacgcaaacccuaacgccaacccuaacgcaaaccccaacgcgaaccccaacgcaaaccccaacgcaaaccccaacgccaaccccaacgccaacccaaacgccaauccaaacgcaaaucccccagucaccaacauggaaaacaucaccucaggcuuccucggcccccuucucguccuacaagcugguuucuuccuucuaacccgcauccucacgaucccccaaucccucgacucaugguggaccucacucaacuuucucggaggcucacccguaugccucggacaaaacucccaaucccccaccuccaaccauuccccaaccucaugcccaccaauaugccccggcuaccguuggaugugccuccgccguuucaucauauuccuuuucauacuccuccucugccucaucuuccugcucgugcuccuagacuaucaagguaugcuacccguaugcccacucauccccggcucaaccacgacaaacacuggccccugcaaaacaugcaccacacccgcacaaggaaacuccauguuccccucaugcugcugcaccaaaccaacagacggaaacuguaccugcaucccuauccccuccuccugggccuucgcaaaauaucuaugggagugggccagcguacgcuuuuccuggcuuucccuccugguccccuucguccaaugguucguaggccucuccccaaccguauggcuauccgcaaucuggaugaugugguacuggggcccaucucucuacucaauaguaucacccuucaucccacuccuccccaucuucuucugccucuggguauacaucuaaggacuaguuauaagacugacuagcccgaugggccucccaacgggcccuccuccccuccuugcaccgagauuaauaaaaaaaaaaaaaaaaaaaaaaaaaaaaaaaaaaaaaaaaaaaaaaaaaaaaaaaaaaaaaaaaugcaucccccccccccccccccccccccccccccccaaaggcucuuuucagagccaccagaauu

SEQ ID NO: 9152 - RNA, 1843 nt, Artificial Sequence
  mRNA Design i-3 (A64-N5-C30-hSL-N5) comprising derived and/or modified sequence from Pf(3D7)__XP_001351122.1__HsALB_Pf-CSP(19-272)_L(AAY)_Pf-CSP(346-3 65)_L(AAY)_PADRE_L(PVTN)_HBsAg (opt11)
aggagaaagcuuaccaugaaauggguaaccuucauaucccuucuauucuuauucucuuccgcauacucccucuuccaagaauaucagugcuacggcucauccucaaacacacgaguccucaacgaacucaacuacgacaacgccggcaccaaucucuacaacgaacucgaaaugaacuacuacggcaaacaagaaaacugguacucccuuaagaaaaacucacgcucucucggcgaaaacgacgacggcaacaacgaagacaacgaaaaauuacgcaaacccaaacacaagaaacucaaacaaccagccgacggcaacccagaccccaaugcaaacccuaacgucgaccccaacgccaacccuaacgucgacccaaacgccaacccgaacgucgaccccaacgcaaacccaaacgccaaccccaaugccaaucccaacgccaacccuaacgccaaccccaacgccaaccccaacgccaacccuaacgccaaccccaaugcaaacccaaacgccaacccaaacgcaaacccaaacgccaauccaaacgccaacccaaacgccaaccccaacgccaacccaaacgccaaucccaacgccaaccccaacguagaccccaaugcgaacccaaacgccaacccuaacgccaaccccaacgcaaacccaaacgcuaacccaaacgcaaaccccaacgcaaaccccaacgcaaacccgaacgcgaaccccaacgccaauccaaacgcaaacccuaacgcaaacccaaacgccaacccaaacgccaacccaaacgcaaacccaaacgccaauccaaacgcaaacccgaacgcaaaccccgccgcuuacaucaaacccggaucggccaacaaacccaaagacgaacuugauuacgccaacgacaucgaagcagccuacgcaaaauucguagcggccuggacccuaaaagcagcagcacccgucacaaacauggaaaacaucacaucuggcuucuuaggcccacuccuaguccuccaggccggcuucuuccuacuaacccguauacucaccauaccacaaucacucgacucaugguggaccucccuaaacuuccucggcggaucacccgucugccugggccaaaacucgcaaucccccaccucaaaucauucgcccacaucaugcccgcccaucugccccggcuaccgguggaugugccuccgcagauucauaaucuuccucuucauacuacuacuuugccuaaucuuccucuuaguccuacucgacuaccaaggcaugcuccccgucugcccccuuauacccggcuccaccaccaccaauaccggccccugcaaaaccugcacaacacccgcccaaggcaacucaauguucccguccugcuguugcaccaaaccaaccgacggaaauugcacaugcaucccaauccccucaucaugggcauucgccaaauaccucugggaaugggccuccguccguuucuccuggcucagccuacucguucccuucguccaaugguuugucggccuuucaccuacaguauggcuauccgccauauggaugaugugguacuggggacccucacucuacucaauugucucccccuucaucccauuacuccccaucuucuucugccucugggucuacauauaaggacuaguuauaagacugacuagcccgaugggccucccaacgggcccuccuccccuccuugcaccgagauuaauaaaaaaaaaaaaaaaaaaaaaaaaaaaaaaaaaaaaaaaaaaaaaaaaaaaaaaaaaaaaaaaaugcaucccccccccccccccccccccccccccccccaaaggcucuuuucagagccaccagaauu

SEQ ID NO: 9153 - RNA, 2062 nt, Artificial Sequence
  mRNA Design i-3 (A64-N5-C30-hSL-N5) comprising derived and/or modified sequence from Pf(3D7)__XP_001351122.1__HsALB_Pf-CSP(19-384)_L(PVTN)_HBsAg (opt11)
aggagaaagcuuaccaugaaaugggucaccuucauaucacuccuauuccuauuuucaagcgccuacucccucuuccaagaauaucaaugcuauggcucaagcucaaacacccgcguccucaacgagcuaaacuacgacaacgcaggaaccaaccucuacaacgaacuggaaaugaacuacuacggaaaacaagagaacugguacuccuuaaagaaaaacucccgcucccucggcgaaaacgaugacgguaacaacgaagacaaugaaaaacuccgaaaacccaaacacaagaaacuaaaacaaccagccgacggaaaccccgacccgaacgcaaaccccaacguagacccaaacgcaaacccuaauguagacccaaacgccaacccaaacgucgacccaaacgcaaacccaaacgcuaaccccaacgccaacccaaacgccaaccccaacgccaaccccaaugccaacccaaacgcgaaccccaacgcaaaccccaacgccaacccgaacgccaacccaaacgccaacccaaacgccaaccccaacgcgaacccaaacgccaacccaaacgcuaaccccaacgcaaaccccaacgccaacccuaacgucgacccaaacgccaaucccaacgccaaccccaacgcaaaccccaacgccaacccgaacgcgaaccccaacgcaaaccccaacgcaaacccaaacgccaaccccaacgccaacccaaacgccaacccgaacgccaacccaaacgcgaaucccaaugccaaccccaacgccaauccuaaugcaaacccaaacgcaaaccccaacgccaauccgaacgcaaacccgaacaaaaacaaccaagguaacggccaaggccacaacaugcccaacgaccccaaccgcaacgucgacgaaaacgcaaacgccaacuccgcaguuaaaaacaacaacaacgaagaaccaucagacaaacacauaaaagaauaccucaacaaaauccaaaacucgcucuccaccgaauggucccccuguagcguaaccugcgguaauggaauacaaguccgaaucaaaccaggcucugccaacaaacccaaagacgaacuagacuacgccaacgacauugaaaagaaaaucugcaaaauggaaaaauguagcuccgucuucaacguagucaacuccucccccguuaccaacauggagaacauaaccuccggcuuccucggcccccuucucgugcuacaggccggauucuuccuccuaaccaggauccuaaccaucccccagucacucgacuccugguggaccucacucaacuuccucggcggaucccccgucugccucggacaaaacucccaaucccccaccucaaaccacuccccaaccucuugcccgcccauaugccccgguuaccgcuggaugugccuucgccgcuucaucauauuucuauucauccuccuucucugccuaauauuccuacucguacuccucgacuaccaaggcaugcuacccgucugcccucuuauacccggauccacgacaaccaacaccggccccugcaaaaccugcaccacacccgcccaaggcaacucuauguuccccucaugcugcugcacaaaacccaccgacggcaacugcacaugcauaccaauccccucuuccugggccuuugccaaauaccuuugggaaugggcuuccguccguuuuuccugguuaucccuccuggucccauucguccaaugguucgucggccuuucaccaaccgucuggcuauccgccaucuggaugaugugguacuggggucccucccucuacagcaucgucucaccauuuaucccccuccugcccaucuucuucugcuuguggguauacauaugaggacuaguuauaagacugacuagcccgaugggccucccaacgggcccuccuccccuccuugcaccgagauuaauaaaaaaaaaaaaaaaaaaaaaaaaaaaaaaaaaaaaaaaaaaaaaaaaaaaaaaaaaaaaaaaaugcaucccccccccccccccccccccccccccccccaaaggcucuuuucagagccaccagaauu

SEQ ID NO: 9154 - RNA, 1879 nt, Artificial Sequence
  mRNA Design i-3 (A64-N5-C30-hSL-N5) comprising derived and/or modified sequence from Pf(3D7)__XP_001351122.1__HsALB_Pf-CSP(19-384)_L(SGG)_Ferritin (opt11)
aggagaaagcuuaccaugaaaugggucaccuucauaucacuacuuuuccuguucuccucagcauacucacucuuccaagaguaccaaugcuacggcucaucauccaauacccgcguacuuaacgaauuaaacuacgacaacgcaggcaccaaccucuacaacgaacucgaaaugaacuauuacggaaaacaagaaaacugguacucacuaaagaaaaacagcagaucccucggcgaaaacgacgacggcaauaacgaagacaacgaaaaacugagaaaaccuaaacacaagaaacucaaacaacccgcagacggcaaccccgaccccaacgccaacccaaacguagaccccaacgccaaccccaacgucgaccccaacgccaacccuaaugucgacccaaacgcaaacccuaacgcaaaccccaaugccaacccaaacgccaaccccaacgcaaaccccaacgcaaauccaaacgcaaaucccaacgcaaaccccaaugccaaccccaacgcaaacccaaacgccaaccccaacgcaaaccccaacgcuaacccaaacgccaacccaaacgcaaacccaaacgccaaccccaacgcuaaccccaacgucgaccccaacgccaaccccaacgcaaacccaaacgccaaccccaaugcaaacccaaacgccaaccccaacgcaaacccaaacgccaacccaaacgccaaccccaacgcaaaccccaacgcuaaccccaacgcaaaccccaaugcaaacccgaacgccaacccaaacgcaaacccaaacgccaacccaaacgccaaccccaacgccaacccaaacgccaacccaaacaaaaacaaccaagguaacggacaaggccacaacaugcccaacgauccuaaccgcaacguagacgaaaacgccaacgcaaacagcgcagucaaaaacaacaacaacgaggaaccaucagacaaacacaucaaagaauaccucaacaaaauccaaaacucccuauccacagaauggucacccugcuccguaaccugcggcaacggcauccaaguacgcaucaaacccggauccgcaaacaaaccaaaagaugaauuagauuaugcaaacgacauagaaaagaaaauaugcaaaauggaaaaaugcuccuccguauucaacguagucaacuccucuucagggggacucuccaaagacaucaucaaacuucucaacgaacaagucaacaaagagaugaacagcuccaaccucuacaugucaaugucaagcuggugcuacacacacucacuggacggcgccggccucuuccuauucgaccacgccgcagaagaauacgaacacgccaagaaacuuauaaucuuccuaaacgaaaauaacguaccuguccaacucacaucaaucucggccccagaacauaaauucgaagggcucacgcaaauauuucaaaaagcauacgaacacgaacagcacaucuccgaaucaaucaacaacauugucgaccacgcaaucaaauccaaagaccacgccacauucaacuuccuacaaugguacguggccgaacaacacgaagaagaaguccucuucaaagacauacuagacaaaaucgaacuaaucggcaacgaaaaccacggccucuaccuagccgaccaauacguaaaaggaaucgcgaaaucccgcaaauccuaaggacuaguuauaagacugacuagcccgaugggccucccaacgggcccuccuccccuccuugcaccgagauuaauaaaaaaaaaaaaaaaaaaaaaaaaaaaaaaaaaaaaaaaaaaaaaaaaaaaaaaaaaaaaaaaaugcaucccccccccccccccccccccccccccccccaaaggcucuuuucagagccaccagaauu

SEQ ID NO: 9155 - RNA, 1840 nt, Artificial Sequence
  mRNA Design i-3 (A64-N5-C30-hSL-N5) comprising derived and/or modified sequence from Pf(3D7)__XP_001351122.1__HsALB_Pf-CSP(93-384)_L(PVTN)_HBsAg (opt11)
aggagaaagcuuaccaugaaaugggucaccuuuaucucacuccuauuucucuucucuuccgcauacuccaaacucaaacaacccgcagacggaaaccccgacccaaacgcaaaccccaacguagaccccaacgccaaccccaacgucgaccccaacgccaaccccaacguagaccccaacgcaaaccccaacgccaacccaaacgccaaccccaacgccaaccccaacgccaaucccaacgccaacccaaacgcaaaucccaacgcaaaccccaacgccaaccccaacgccaacccaaacgccaauccaaacgcaaacccuaacgccaacccuaacgcgaaccccaacgccaaccccaacgcaaaccccaacgccaaccccaaugucgaccccaacgccaaccccaacgccaaccccaacgcaaaccccaacgcaaacccaaacgccaaucccaacgccaaccccaacgcaaacccuaacgccaaccccaaugccaauccuaacgccaaccccaacgccaacccuaacgccaacccaaacgccaaccccaacgccaaccccaacgccaacccuaacgccaacccuaacgccaacccaaacgccaauccaaacaagaacaaccaaggcaacggucaaggccacaauaugccaaacgacccaaaccgaaacguagacgaaaacgccaacgccaacuccgccgucaaaaacaacaacaacgaagaacccuccgacaaacacaucaaagaauaucugaacaaaauccaaaacucccucuccaccgaauggucccccugcuccgucacuuguggcaauggcauacaaguccgcaucaaacccggcucagccaacaaacccaaagacgaacucgacuacgcaaacgacaucgaaaagaaaauaugcaaaauggaaaaaugcuccucugucuucaacgucgucaacuccucgcccguaaccaacauggaaaacaucaccucaggauuccucggcccccuacucguccuccaagccggcuucuuccuccucacccgaauccuuacaaucccccaaucccuugacucaugguggaccucccuuaauuuccucggcgguucccccgucugccuuggccaaaacucacaaucccccaccucaaaccacucccccacuuccugcccgcccauaugccccggcuaccgcuggaugugccuccgccgguucaucauauuccucuucauccuacuccucugccuuauauuucuauuaguccuccuagacuaccaaggaaugcuccccguaugcccacuaauccccggauccaccaccaccaacaccggccccugcaaaaccugcaccaccccugcacaaggaaacuccauguucccaucuuguugcugcacaaaaccaaccgacggcaacuguaccugcauccccaucccuucaucaugggccuucgccaaauaccuaugggaaugggccucaguacguuucuccuggcuaucccuccucgucccauucguucaaugguucgucggccuaucccccacgguauggcucuccgcaauauggaugaugugguacuggggccccucacuauacaguauaguuucccccuucauaccccuccuccccauauucuucugccucuggguauacaucuagggacuaguuauaagacugacuagcccgaugggccucccaacgggcccuccuccccuccuugcaccgagauuaauaaaaaaaaaaaaaaaaaaaaaaaaaaaaaaaaaaaaaaaaaaaaaaaaaaaaaaaaaaaaaaaaugcaucccccccccccccccccccccccccccccccaaaggcucuuuucagagccaccagaauu

SEQ ID NO: 9156 - RNA, 1501 nt, Artificial Sequence
  mRNA Design i-3 (A64-N5-C30-hSL-N5) comprising derived and/or modified sequence from Pf(3D7)__XP_001351122.1__HsALB_Pf-CSP(199-377)_L(PVTN)_HBsAg (opt11)
aggagaaagcuuaccaugaaauggguaaccuucaucucccuccuauucuuauucucaucagccuacuccgacccaaacgcaaaccccaaugccaaccccaacgccaaccccaacgccaaucccaacgccaaccccaacgccaaucccaaugcuaaccccaacgccaacccaaacgccaacccaaacgcaaaccccaacgccaaccccaacgccaaccccaacgccaacccaaacgccaaccccaacgcaaaccccaacgccaacccaaacgccaaccccaacgccaacccaaacaaaaacaaucaaggcaacggccaaggacacaacaugcccaacgaccccaaccgcaacgucgacgaaaacgcaaacgccaacucugcagucaaaaacaacaacaacgaagaacccuccgacaaacacauaaaagaauaccucaacaaaauccaaaacucccucuccacagaaugguccccaugcuccgucacgugcggcaacggcauccaaguacgcaucaaacccggcucugccaacaaaccuaaagacgaacucgacuacgccaacgacaucgaaaagaaaaucugcaaaauggaaaaaugcuccucaguccccguaacuaacauggaaaacaucacguccggcuuccucggcccccuccuaguccuccaagccggcuucuuccuacucacacgcauucuuaccaucccgcaaucacucgacuccugguggaccucccucaacuucuuaggcggcuccccugucugccucggccaaaacucacaaucccccacuucaaaccacucacccaccagcugcccacccauaugcccaggauaccgcuggaugugccuccgccguuucauaaucuuccucuucauacuccuacucugccuaaucuuccuccucguacuccuagacuaccaaggcaugcuccccgucugcccacucauccccggaagcacuacaaccaacaccggccccugcaaaacaugcaccacccccgcacaaggcaacuccauguuccccuccugcugcugcacaaaacccacugauggcaacugcacuugcauccccauccccuccucaugggccuucgccaaauaucucugggaaugggccagcguccgguucucuuggcucucacuccuaguccccuucguucaaugguucguaggccuaucccccaccgucuggcucuccgcaauauggaugaugugguauuggggccccucccucuacuccauuguaucccccuucaucccacuacuccccaucuucuucugccuuugggucuacauauaaggacuaguuauaagacugacuagcccgaugggccucccaacgggcccuccuccccuccuugcaccgagauuaauaaaaaaaaaaaaaaaaaaaaaaaaaaaaaaaaaaaaaaaaaaaaaaaaaaaaaaaaaaaaaaaaugcaucccccccccccccccccccccccccccccccaaaggcucuuuucagagccaccagaauu

SEQ ID NO: 9157 - RNA, 1198 nt, Artificial Sequence
  mRNA Design i-3 (A64-N5-C30-hSL-N5) comprising derived and/or modified sequence from Pf(3D7)__XP_001351122.1__HsALB_Pf-CSP(19-272)_L(AAY)_Pf-CSP(346-3 75)_L(AAY)_Pf-CSP(310-327) (opt11)
aggagaaagcuuaccaugaaauggguaaccuucaucucacuccuauuccuguucuccagugcauacucacucuuccaagaauaccaaugcuacggcuccagcagcaacacgcgaguccucaacgaacuaaacuacgauaacgccggaaccaaccuuuacaacgaacucgaaaugaacuacuacggcaaacaagaaaacugguacucacuaaaaaaaaacagcagaucacuaggcgaaaacgacgacggaaacaacgaagacaacgaaaaacuacgcaagcccaaacacaagaaacucaaacaacccgcagacggaaacccagaccccaacgcaaaccccaacguagaccccaacgcaaaccccaacguagaccccaacgcaaaucccaacguagacccaaacgcaaaccccaacgcaaacccaaacgcaaacccaaacgcgaacccaaacgcaaacccaaacgcaaacccgaacgccaacccaaacgcaaacccaaacgcuaaccccaacgcaaacccaaacgcaaacccaaacgcaaacccaaacgcaaacccaaacgcaaacccaaacgcaaacccgaacgcaaacccaaacgcaaaccccaacguagacccaaacgccaacccaaacgcaaaccccaacgccaacccaaacgcaaacccaaacgcaaacccaaacgcaaacccaaacgcaaacccaaacgcaaacccaaacgcaaaccccaacgcgaacccaaacgccaacccaaacgcaaacccaaacgcgaacccaaacgccaaccccaacgcaaaccccaacgcaaaccccaacgcaaacccaaacgcaaaccccgccgcuuacauaaaacccggcucggccaauaaaccaaaagacgaacucgacuacgccaacgacauagaaaaaaaaauaugcaaaauggaaaaaugcagcgccgccuacgaaccaucagacaaacacaucaaagaauaccucaacaaaauacaaaacagccucuaaggacuaguuauaagacugacuagcccgaugggccucccaacgggcccuccuccccuccuugcaccgagauuaauaaaaaaaaaaaaaaaaaaaaaaaaaaaaaaaaaaaaaaaaaaaaaaaaaaaaaaaaaaaaaaaaugcaucccccccccccccccccccccccccccccccaaaggcucuuuucagagccaccagaauu

SEQ ID NO: 9158 - RNA, 1246 nt, Artificial Sequence
  mRNA Design i-3 (A64-N5-C30-hSL-N5) comprising derived and/or modified sequence from Pf(3D7)__XP_001351122.1__HsALB_Pf-CSP(19-272)_L(AAY)_Pf-CSP(346-3 75)_L(AAY)_Pf-CSP(310-327)_L(AAY)_PADRE (opt11)
aggagaaagcuuaccaugaaauggguaacauuuaucucccuccucuuccucuuuuccuccgcauacucacucuuccaagaauaccaaugcuacggaucaagcuccaacacccgcguccuuaacgaacuuaacuacgacaacgccggcaccaacuuauacaacgaacucgagaugaacuacuacggcaaacaagaaaacugguacucccucaaaaaaaacuccagaucccucggcgaaaacgacgacggaaacaacgaagacaacgaaaaacuccgcaaacccaaacacaaaaaacucaaacaacccgcugacggcaacccugaccccaacgccaaccccaacguagaccccaacgccaaucccaacguagacccaaacgccaaccccaacguagaccccaacgccaaccccaacgcaaacccaaacgccaaccccaacgccaaccccaacgcgaacccaaacgccaaccccaacgccaacccuaacgccaacccgaacgccaaccccaacgccaaccccaacgccaaccccaacgcgaaccccaacgcaaaccccaacgccaaccccaacgcaaaccccaacgccaaccccaacgccaaccccaacguagaccccaacgccaacccaaacgccaacccaaacgcaaaccccaacgccaauccaaacgcaaaccccaacgcaaaccccaaugccaacccaaacgccaaccccaacgccaacccaaacgccaacccaaacgccaaccccaacgcaaacccaaacgcaaaccccaacgcaaacccuaacgccaacccaaacgccaacccaaacgcaaaccccaacgcaaaccccgccgccuacaucaaaccaggcuccgccaauaaaccaaaagacgaacucgacuacgcaaaugacauagaaaaaaaaauaugcaaaauggaaaaaugcuccgcagccuacgaacccagcgacaaacauaucaaagaauacuuaaacaaaauccaaaacucccuagccgccuacgccaaauucgucgcagccuggacccucaaagccgccgccuaaggacuaguuauaagacugacuagcccgaugggccucccaacgggcccuccuccccuccuugcaccgagauuaauaaaaaaaaaaaaaaaaaaaaaaaaaaaaaaaaaaaaaaaaaaaaaaaaaaaaaaaaaaaaaaaaugcaucccccccccccccccccccccccccccccccaaaggcucuuuucagagccaccagaauu

SEQ ID NO: 9159 - RNA, 1246 nt, Artificial Sequence
  mRNA Design i-3 (A64-N5-C30-hSL-N5) comprising derived and/or modified sequence from Pf(3D7)__XP_001351122.1__HsALB_Pf-CSP(19-272)_L(AAY)_Pf-CSP(310-3 27)_L(AAY)_Pf-CSP(346-375)_L(AAY)_PADRE (opt11)
aggagaaagcuuaccaugaaaugggugaccuuuaucucacuccucuuccucuucucaagcgcauacucacucuuccaagaauaccaaugcuacgguucaagcucaaacacaagaguccucaacgaacucaacuacgacaacgccggaaccaaccucuacaacgaacucgaaaugaacuacuacggcaaacaagaaaacugguacucacucaaaaaaaacagcaggucccuaggcgaaaacgacgacggaaacaacgaagacaacgaaaaacuccgcaaaccaaaacacaaaaaacugaaacaacccgcagacggaaacccagaccccaacgcaaacccgaacgucgacccgaacgccaacccaaacguagacccaaacgcaaaccccaacgucgacccaaacgcaaacccaaacgcaaacccaaacgcaaacccgaacgcaaacccaaacgcgaacccaaacgcaaacccaaacgcaaacccaaacgccaacccaaacgcaaacccaaaugcaaaccccaacgcaaacccgaacgcaaacccaaacgcaaaccccaacgcaaacccaaacgcuaacccaaacgcgaaccccaacgcaaacccaaacguggacccaaacgcaaacccaaacgcaaacccaaacgcgaacccgaacgcaaacccaaacgcgaacccaaacgcaaaccccaacgcaaacccaaacgcaaacccaaacgccaacccaaacgcaaacccaaacgcgaaccccaacgccaacccaaacgcaaacccaaacgcaaacccaaacgcaaacccaaacgcaaacccaaacgccaacccaaacgcaaacccagcugccuacgaacccuccgacaaacacaucaaagaguaccugaacaaaauccaaaacucccucgcagccuacaucaagcccggauccgcaaacaaacccaaagacgaacucgacuacgccaacgacauagaaaaaaaaaucugcaaaauggaaaaaugcucagccgcauacgcaaaauucguagcagccuggacccuaaaagcggcagcauaaggacuaguuauaagacugacuagcccgaugggccucccaacgggcccuccuccccuccuugcaccgagauuaauaaaaaaaaaaaaaaaaaaaaaaaaaaaaaaaaaaaaaaaaaaaaaaaaaaaaaaaaaaaaaaaaugcaucccccccccccccccccccccccccccccccaaaggcucuuuucagagccaccagaauu

SEQ ID NO: 9160 - RNA, 1300 nt, Artificial Sequence
  mRNA Design i-3 (A64-N5-C30-hSL-N5) comprising derived and/or modified sequence from Pf(3D7)__XP_001351122.1__HsALB_Pf-CSP(19-272)_L(AAY)_Pf-CSP(310-3 27)_L(AAY)_Pf-CSP(346-375)_L(AAY)_PADRE_L(AAY)_P2 (opt11)
aggagaaagcuuaccaugaaaugggugaccuucauaucacuauuauuccucuucucaagcgcauacucacucuuccaagaauaccaaugcuacggcuccuccucaaacacgcgcguacucaacgaacuaaacuacgacaacgccggaacaaaccucuacaacgaacuagaaaugaacuacuacggcaaacaagaaaacugguacucccuaaaaaaaaacucaagaucccuaggcgagaaugacgacggcaacaacgaagacaacgaaaaacuccgcaaacccaaacacaaaaaacucaaacaacccgccgacggaaacccagacccaaacgccaacccaaacgucgacccaaacgcaaaccccaacguagaccccaacgcaaacccaaacguagacccaaacgcaaacccaaacgcaaacccaaacgcaaaccccaacgccaacccaaacgcaaacccaaacgccaauccaaacgcaaacccaaaugccaacccaaacgcaaacccaaacgcaaacccaaacgccaaccccaacgcaaacccaaacgcaaacccaaacgccaacccaaacgcaaacccaaacgcaaaccccaacgccaacccgaacguagaccccaacgcaaaccccaacgcaaacccaaacgccaauccaaacgcaaaccccaacgcaaaccccaacgcaaaccccaacgccaauccaaacgccaaccccaacgcgaacccgaacgcaaacccaaacgcaaacccaaacgcaaacccaaacgcaaacccaaacgcaaacccaaacgcaaacccgaacgcaaaccccaacgccaacccaaacgcaaacccagccgcauacgaacccucagacaaacacauaaaagaauaccuaaacaaaauccaaaacucacucgcugccuacaucaaaccaggaagcgcaaacaaacccaaagacgaacucgauuacgccaacgacaucgaaaaaaaaaucugcaaaauggaaaaaugcuccgccgccuacgcaaaauucgucgcagccuggacucuaaaagccgccgcagccgcauaccaauacauaaaagccaacucaaaauucaucggaaucaccgaacuguaaggacuaguuauaagacugacuagcccgaugggccucccaacgggcccuccuccccuccuugcaccgagauuaauaaaaaaaaaaaaaaaaaaaaaaaaaaaaaaaaaaaaaaaaaaaaaaaaaaaaaaaaaaaaaaaaugcaucccccccccccccccccccccccccccccccaaaggcucuuuucagagccaccagaauu

SEQ ID NO: 9161 - RNA, 1264 nt, Artificial Sequence
  mRNA Design i-3 (A64-N5-C30-hSL-N5) comprising derived and/or modified sequence from Pf(3D7)__XP_001351122.1__HsALB_Pf-CSP(19-272)_L(AAY)_Pf-CSP(310-3 27)_Linker (AAY)_Pf-CSP(346-397) (opt11)
aggagaaagcuuaccaugaaaugggucaccuucaucucacuccuguuccuauucucgagcgcauacucccucuuccaagaauaccagugcuacggcucaagcucaaacacacgcguacucaacgaacuaaacuacgacaacgccggaaccaaccucuacaacgaacuagaaaugaacuacuacggcaaacaagagaacugguacucucuaaagaaaaacagcagaucccugggcgagaacgacgacggaaacaacgaagacaacgagaaacuacgcaaacccaaacacaagaaacuaaaacaacccgcagauggaaacccagauccaaacgcaaacccaaacgucgacccuaacgcaaaccccaacguagaccccaacgcaaaccccaacguagacccaaacgccaacccaaacgccaacccaaacgccaacccgaacgcaaaccccaaugccaacccaaacgccaacccgaacgccaacccaaacgcgaaccccaacgccaacccaaacgcaaacccaaacgcaaacccuaacgcaaaccccaacgccaacccaaaugccaacccaaacgcaaacccaaacgcaaacccaaacgccaaccccaacguagacccaaacgcaaaccccaacgcaaacccaaacgcaaacccaaacgccaacccaaacgcaaacccaaacgcaaacccaaacgcaaacccgaacgccaaccccaacgcaaacccaaacgcaaacccaaacgccaacccaaacgccaacccaaacgcaaaccccaacgcaaaccccaacgccaaccccaacgccaacccaaacgcaaacccaaacgcaaacccagccgcauacgaacccucagacaaacacauaaaagaauaccucaauaaaauccaaaacucacuugcagccuacauaaaaccaggcagcgcgaacaaacccaaagacgaacucgacuacgcgaacgacauagaaaagaaaaucugcaaaauggaaaaaugcucauccgucuucaaugucguaaacucauccauaggccuaaucaugguccucuccuuccuauuccucaacuaaggacuaguuauaagacugacuagcccgaugggccucccaacgggcccuccuccccuccuugcaccgagauuaauaaaaaaaaaaaaaaaaaaaaaaaaaaaaaaaaaaaaaaaaaaaaaaaaaaaaaaaaaaaaaaaaugcaucccccccccccccccccccccccccccccccaaaggcucuuuucagagccaccagaauu

SEQ ID NO: 9162 - RNA, 1888 nt, Artificial Sequence
  mRNA Design a-1 (hSL-A64-N5) comprising derived and/or modified sequence from Pf(3D7)__XP_001351122.1__LumSynt_L(GGS4-GGG)_Pf-CSP(19-397) (opt1)
aggagagucccgcagucggcguccagcggcucugcuuguucgugugugugucguugcaggccuuauucaagcuuaccaugcagaucuacgagggcaagcugaccgccgaggggcuccgcuucggcaucguggccagccgguucaaccacgcgcuggucgaccgccugguggagggggccaucgacgccaucgugcggcacggcgggcgcgaggaggacaucacccucguccgggugcccggcuccugggagaucccgguggccgccggcgagcuggcccgcaaggaggacaucgacgcggucaucgccaucggggugcugauccggggcgccacgccccacuucgacuacaucgccagcgagguguccaaggggcucgcggaccugagccuggagcuccgcaagcccaucaccuucggcgucaucaccgccgacacccuggagcaggccaucgagcgggccgggacgaagcacggcaacaagggcugggaggccgcgcuguccgccaucgagauggccaaccucuucaagagccugcgcggcgggagcggcggguccggcgggagcggcggcuccgggggcgggcuguuccaggaguaccagugcuacggcuccagcuccaacacccgggugcucaacgagcugaacuacgacaacgcggggaccaaccuguacaacgagcucgagaugaacuacuacggcaagcaggagaacugguacagccugaagaagaacucccgcagccugggggagaacgacgacggcaacaacgaggacaacgagaagcuccggaagcccaagcacaagaagcugaagcagccggccgacgggaaccccgaccccaacgccaaccccaacguggacccgaacgccaaccccaacgucgaccccaacgccaaccccaacguggacccgaacgcgaaccccaacgccaaccccaacgccaaccccaacgccaacccgaacgcgaaccccaacgccaaccccaacgccaaccccaacgccaacccgaacgccaaccccaacgcgaaccccaacgccaaccccaacgccaacccgaacgccaaccccaacgccaaccccaacgcgaaccccaacgccaacccgaacgccaaccccaacguggaccccaacgccaaccccaacgccaacccgaacgcgaaccccaacgccaaccccaacgccaacccgaacgccaaccccaacgccaaccccaacgcgaaccccaacgccaacccgaacgccaaccccaacgccaaccccaacgcgaaccccaacgccaacccgaacgccaaccccaacgccaaccccaacgccaaccccaacgcgaacccgaacgccaaccccaacaagaacaaccagggcaacggccaggggcacaacaugcccaacgaccccaaccgcaacgucgacgagaacgccaacgccaacuccgccgugaagaacaacaacaacgaggagccgagcgacaagcacaucaaggaguaccugaacaagauccagaacucccucagcacggaguggucccccugcagcgugaccugcggcaacgggauccagguccggaucaagcccggcuccgcgaacaagcccaaggacgagcuggacuacgccaacgacaucgagaagaagaucugcaagauggagaagugcagcuccguguucaacguggucaacagcuccaucgggcugaucauggugcucagcuuccuguuccugaacugaggacuagucccuguucccagagcccacuuuuuuuucuuuuuuugaaauaaaauagccugucuuucagaucucaaaggcucuuuucagagccaccaaaaaaaaaaaaaaaaaaaaaaaaaaaaaaaaaaaaaaaaaaaaaaaaaaaaaaaaaaaaaaaaagaauu

SEQ ID NO: 9163 - RNA, 1435 nt, Artificial Sequence
  mRNA Design a-1 (hSL-A64-N5) comprising derived and/or modified sequence from Pf(3D7)__XP_001351122.1__HsALB_Pf-CSP(19-397) (opt1)
aggagagucccgcagucggcguccagcggcucugcuuguucgugugugugucguugcaggccuuauucaagcuuaccaugaagugggugaccuucaucagccuccuguuccuguucuccagcgccuacucccuguuccaggaguaccagugcuacggcuccagcuccaacacccgggugcucaacgagcugaacuacgacaacgcggggaccaaccuguacaacgagcucgagaugaacuacuacggcaagcaggagaacugguacagccugaagaagaacucccgcagccugggggagaacgacgacggcaacaacgaggacaacgagaagcuccggaagcccaagcacaagaagcugaagcagccggccgacgggaaccccgaccccaacgccaaccccaacguggacccgaacgccaaccccaacgucgaccccaacgccaaccccaacguggacccgaacgcgaaccccaacgccaaccccaacgccaaccccaacgccaacccgaacgcgaaccccaacgccaaccccaacgccaaccccaacgccaacccgaacgccaaccccaacgcgaaccccaacgccaaccccaacgccaacccgaacgccaaccccaacgccaaccccaacgcgaaccccaacgccaacccgaacgccaaccccaacguggaccccaacgccaaccccaacgccaacccgaacgcgaaccccaacgccaaccccaacgccaacccgaacgccaaccccaacgccaaccccaacgcgaaccccaacgccaacccgaacgccaaccccaacgccaaccccaacgcgaaccccaacgccaacccgaacgccaaccccaacgccaaccccaacgccaaccccaacgcgaacccgaacgccaaccccaacaagaacaaccagggcaacggccaggggcacaacaugcccaacgaccccaaccgcaacgucgacgagaacgccaacgccaacuccgccgugaagaacaacaacaacgaggagccgagcgacaagcacaucaaggaguaccugaacaagauccagaacucccucagcacggaguggucccccugcagcgugaccugcggcaacgggauccagguccggaucaagcccggcuccgcgaacaagcccaaggacgagcuggacuacgccaacgacaucgagaagaagaucugcaagauggagaagugcagcuccguguucaacguggucaacagcuccaucgggcugaucauggugcucagcuuccuguuccugaacugaggacuagucccuguucccagagcccacuuuuuuuucuuuuuuugaaauaaaauagccugucuuucagaucucaaaggcucuuuucagagccaccaaaaaaaaaaaaaaaaaaaaaaaaaaaaaaaaaaaaaaaaaaaaaaaaaaaaaaaaaaaaaaaaagaauu

SEQ ID NO: 9164 - RNA, 1750 nt, Artificial Sequence
  mRNA Design a-1 (hSL-A64-N5) comprising derived and/or modified sequence from Pf(3D7)__XP_001351122.1__HsALB_Pf-CSP(19-272)_L(PVTN)_HBsAg (opt1)
aggagagucccgcagucggcguccagcggcucugcuuguucgugugugugucguugcaggccuuauucaagcuuaccaugaagugggugaccuucaucagccugcucuuccuguucuccagcgccuacucccuguuccaggaguaccagugcuacggcuccagcuccaacacccgggugcucaacgagcugaacuacgacaacgcggggaccaaccuguacaacgagcucgagaugaacuacuacggcaagcaggagaacugguacagccugaagaagaacucccgcagccugggggagaacgacgacggcaacaacgaggacaacgagaagcuccggaagcccaagcacaagaagcugaagcagccggccgacgggaaccccgaccccaacgccaaccccaacguggacccgaacgccaaccccaacgucgaccccaacgccaaccccaacguggacccgaacgcgaaccccaacgccaaccccaacgccaaccccaacgccaacccgaacgcgaaccccaacgccaaccccaacgccaaccccaacgccaacccgaacgccaaccccaacgcgaaccccaacgccaaccccaacgccaacccgaacgccaaccccaacgccaaccccaacgcgaaccccaacgccaacccgaacgccaaccccaacguggaccccaacgccaaccccaacgccaacccgaacgcgaaccccaacgccaaccccaacgccaacccgaacgccaaccccaacgccaaccccaacgcgaaccccaacgccaacccgaacgccaaccccaacgccaaccccaacgcgaaccccaacgccaacccgaacgccaaccccaacgccaaccccaacgccaaccccaacgcgaacccgaacgccaaccccccggugacgaacauggagaacaucaccagcggcuuccuggggccccuccuggugcugcaggccggcuucuuccuccugacccgcauccugaccaucccgcagucccucgacagcugguggaccucccugaacuuccucgggggcagccccgucugccuggggcagaacucccagagccccaccuccaaccacagccccaccuccugcccgcccaucugccccggcuaccgguggaugugccugcgccgguucaucaucuuccuguucauccuccugcugugccucaucuuccugcuggugcuccuggacuaccagggcaugcugcccgugugcccgcucauccccgggagcacgaccaccaacaccggccccugcaagacgugcaccacccccgcccaggggaacuccauguucccgagcugcugcugcaccaagcccacggacggcaacugcacgugcauccccauccccuccagcugggcguucgccaaguaccugugggagugggccuccguccgcuucagcuggcugucccuccuggugccguucgugcagugguucgucgggcugagccccaccguguggcucuccgccaucuggaugaugugguacuggggccccagccuguacagcaucgugucccccuucaucccgcugcuccccaucuucuucugccugugggucuacaucugaggacuagucccuguucccagagcccacuuuuuuuucuuuuuuugaaauaaaauagccugucuuucagaucucaaaggcucuuuucagagccaccaaaaaaaaaaaaaaaaaaaaaaaaaaaaaaaaaaaaaaaaaaaaaaaaaaaaaaaaaaaaaaaaagaauu

SEQ ID NO: 9165 - RNA, 1867 nt, Artificial Sequence
  mRNA Design a-1 (hSL-A64-N5) comprising derived and/or modified sequence from Pf(3D7)__XP_001351122.1__HsALB_Pf-CSP(19-272)_L(AAY)_Pf-CSP(346-3 65)_L(AAY)_PADRE_L(PVTN)_HBsAg (opt1)
aggagagucccgcagucggcguccagcggcucugcuuguucgugugugugucguugcaggccuuauucaagcuuaccaugaagugggugaccuucaucagccugcucuuccuguucuccagcgccuacucccuguuccaggaguaccagugcuacggcuccagcuccaacacccgggugcucaacgagcugaacuacgacaacgcggggaccaaccuguacaacgagcucgagaugaacuacuacggcaagcaggagaacugguacagccugaagaagaacucccgcagccugggggagaacgacgacggcaacaacgaggacaacgagaagcuccggaagcccaagcacaagaagcugaagcagccggccgacgggaaccccgaccccaacgccaaccccaacguggacccgaacgccaaccccaacgucgaccccaacgccaaccccaacguggacccgaacgcgaaccccaacgccaaccccaacgccaaccccaacgccaacccgaacgcgaaccccaacgccaaccccaacgccaaccccaacgccaacccgaacgccaaccccaacgcgaaccccaacgccaaccccaacgccaacccgaacgccaaccccaacgccaaccccaacgcgaaccccaacgccaacccgaacgccaaccccaacguggaccccaacgccaaccccaacgccaacccgaacgcgaaccccaacgccaaccccaacgccaacccgaacgccaaccccaacgccaaccccaacgcgaaccccaacgccaacccgaacgccaaccccaacgccaaccccaacgcgaaccccaacgccaacccgaacgccaaccccaacgccaaccccaacgccaaccccaacgcgaacccgaacgccaaccccgccgcguauaucaagcccggcuccgcgaacaagcccaaggacgagcuggacuacgccaacgacaucgaggcggccuacgccaaguucguggccgccuggacccugaaggcggccgccccggugacgaacauggagaacaucaccagcggcuuccuggggccccuccuggugcugcaggccggcuucuuccuccugacccgcauccugaccaucccgcagucccucgacagcugguggaccucccugaacuuccucgggggcagccccgucugccuggggcagaacucccagagccccaccuccaaccacagccccaccuccugcccgcccaucugccccggcuaccgguggaugugccugcgccgguucaucaucuuccuguucauccuccugcugugccucaucuuccugcuggugcuccuggacuaccagggcaugcugcccgugugcccgcucauccccgggagcacgaccaccaacaccggccccugcaagacgugcaccacccccgcccaggggaacuccauguucccgagcugcugcugcaccaagcccacggacggcaacugcacgugcauccccauccccuccagcugggcguucgccaaguaccugugggagugggccuccguccgcuucagcuggcugucccuccuggugccguucgugcagugguucgucgggcugagccccaccguguggcucuccgccaucuggaugaugugguacuggggccccagccuguacagcaucgugucccccuucaucccgcugcuccccaucuucuucugccugugggucuacaucugaggacuagucccuguucccagagcccacuuuuuuuucuuuuuuugaaauaaaauagccugucuuucagaucucaaaggcucuuuucagagccaccaaaaaaaaaaaaaaaaaaaaaaaaaaaaaaaaaaaaaaaaaaaaaaaaaaaaaaaaaaaaaaaaagaauu

SEQ ID NO: 9166 - RNA, 1867 nt, Artificial Sequence
  mRNA Design a-1 (hSL-A64-N5) comprising derived and/or modified sequence from Pf(3D7)__XP_001351122.1__HsALB_Pf-CSP(19-272)_L(AAY)_Pf-CSP(346-3 65)_L(AAY)_PADRE_L(PVTN)_HBsAg (opt1)
aggagagucccgcagucggcguccagcggcucugcuuguucgugugugugucguugcaggccuuauucaagcuuaccaugaagugggugaccuucaucagccuccuguuccuguucuccagcgccuacucccuguuccaggaguaccagugcuacggcuccagcuccaacacccgggugcucaacgagcugaacuacgacaacgcggggaccaaccuguacaacgagcucgagaugaacuacuacggcaagcaggagaacugguacagccugaagaagaacucccgcagccugggggagaacgacgacggcaacaacgaggacaacgagaagcuccggaagcccaagcacaagaagcugaagcagccggccgacgggaaccccgaccccaacgccaaccccaacguggacccgaacgccaaccccaacgucgaccccaacgccaaccccaacguggacccgaacgcgaaccccaacgccaaccccaacgccaaccccaacgccaacccgaacgcgaaccccaacgccaaccccaacgccaaccccaacgccaacccgaacgccaaccccaacgcgaaccccaacgccaaccccaacgccaacccgaacgccaaccccaacgccaaccccaacgcgaaccccaacgccaacccgaacgccaaccccaacguggaccccaacgccaaccccaacgccaacccgaacgcgaaccccaacgccaaccccaacgccaacccgaacgccaaccccaacgccaaccccaacgcgaaccccaacgccaacccgaacgccaaccccaacgccaaccccaacgcgaaccccaacgccaacccgaacgccaaccccaacgccaaccccaacgccaaccccaacgcgaacccgaacgccaaccccgccgcguauaucaagcccggcuccgcgaacaagcccaaggacgagcuggacuacgccaacgacaucgaggcggccuacgccaaguucguggccgccuggacccugaaggcggccgccccggugacgaacauggagaacaucaccagcggcuuccuggggccccuccuggugcugcaggccggcuucuuccuccugacccgcauccugaccaucccgcagucccucgacagcugguggaccucccugaacuuccucgggggcagccccgucugccuggggcagaacucccagagccccaccuccaaccacagccccaccuccugcccgcccaucugccccggcuaccgguggaugugccugcgccgguucaucaucuuccuguucauccuccugcugugccucaucuuccugcuggugcuccuggacuaccagggcaugcugcccgugugcccgcucauccccgggagcacgaccaccaacaccggccccugcaagacgugcaccacccccgcccaggggaacuccauguucccgagcugcugcugcaccaagcccacggacggcaacugcacgugcauccccauccccuccagcugggcguucgccaaguaccugugggagugggccuccguccgcuucagcuggcugucccuccuggugccguucgugcagugguucgucgggcugagccccaccguguggcucuccgccaucuggaugaugugguacuggggccccagccuguacagcaucgugucccccuucaucccgcugcuccccaucuucuucugccugugggucuacaucugaggacuagucccuguucccagagcccacuuuuuuuucuuuuuuugaaauaaaauagccugucuuucagaucucaaaggcucuuuucagagccaccaaaaaaaaaaaaaaaaaaaaaaaaaaaaaaaaaaaaaaaaaaaaaaaaaaaaaaaaaaaaaaaaagaauu

SEQ ID NO: 9167 - RNA, 2086 nt, Artificial Sequence
  mRNA Design a-1 (hSL-A64-N5) comprising derived and/or modified sequence from Pf(3D7)__XP_001351122.1__HsALB_Pf-CSP(19-384)_L(PVTN)_HBsAg (opt1)
aggagagucccgcagucggcguccagcggcucugcuuguucgugugugugucguugcaggccuuauucaagcuuaccaugaagugggugaccuucaucagccugcucuuccuguucuccagcgccuacucccuguuccaggaguaccagugcuacggcuccagcuccaacacccgggugcucaacgagcugaacuacgacaacgcggggaccaaccuguacaacgagcucgagaugaacuacuacggcaagcaggagaacugguacagccugaagaagaacucccgcagccugggggagaacgacgacggcaacaacgaggacaacgagaagcuccggaagcccaagcacaagaagcugaagcagccggccgacgggaaccccgaccccaacgccaaccccaacguggacccgaacgccaaccccaacgucgaccccaacgccaaccccaacguggacccgaacgcgaaccccaacgccaaccccaacgccaaccccaacgccaacccgaacgcgaaccccaacgccaaccccaacgccaaccccaacgccaacccgaacgccaaccccaacgcgaaccccaacgccaaccccaacgccaacccgaacgccaaccccaacgccaaccccaacgcgaaccccaacgccaacccgaacgccaaccccaacguggaccccaacgccaaccccaacgccaacccgaacgcgaaccccaacgccaaccccaacgccaacccgaacgccaaccccaacgccaaccccaacgcgaaccccaacgccaacccgaacgccaaccccaacgccaaccccaacgcgaaccccaacgccaacccgaacgccaaccccaacgccaaccccaacgccaaccccaacgcgaacccgaacgccaaccccaacaagaacaaccagggcaacggccaggggcacaacaugcccaacgaccccaaccgcaacgucgacgagaacgccaacgccaacuccgccgugaagaacaacaacaacgaggagccgagcgacaagcacaucaaggaguaccugaacaagauccagaacucccucagcacggaguggucccccugcagcgugaccugcggcaacgggauccagguccggaucaagcccggcuccgcgaacaagcccaaggacgagcuggacuacgccaacgacaucgagaagaagaucugcaagauggagaagugcagcuccguguucaacguggucaacagcuccccggugacgaacauggagaacaucaccagcggcuuccuggggccccuccuggugcugcaggccggcuucuuccuccugacccgcauccugaccaucccgcagucccucgacagcugguggaccucccugaacuuccucgggggcagccccgucugccuggggcagaacucccagagccccaccuccaaccacagccccaccuccugcccgcccaucugccccggcuaccgguggaugugccugcgccgguucaucaucuuccuguucauccuccugcugugccucaucuuccugcuggugcuccuggacuaccagggcaugcugcccgugugcccgcucauccccgggagcacgaccaccaacaccggccccugcaagacgugcaccacccccgcccaggggaacuccauguucccgagcugcugcugcaccaagcccacggacggcaacugcacgugcauccccauccccuccagcugggcguucgccaaguaccugugggagugggccuccguccgcuucagcuggcugucccuccuggugccguucgugcagugguucgucgggcugagccccaccguguggcucuccgccaucuggaugaugugguacuggggccccagccuguacagcaucgugucccccuucaucccgcugcuccccaucuucuucugccugugggucuacaucugaggacuagucccuguucccagagcccacuuuuuuuucuuuuuuugaaauaaaauagccugucuuucagaucucaaaggcucuuuucagagccaccaaaaaaaaaaaaaaaaaaaaaaaaaaaaaaaaaaaaaaaaaaaaaaaaaaaaaaaaaaaaaaaaagaauu

SEQ ID NO: 9168 - RNA, 2086 nt, Artificial Sequence
  mRNA Design a-1 (hSL-A64-N5) comprising derived and/or modified sequence from Pf(3D7)__XP_001351122.1__HsALB_Pf-CSP(19-384)_L(PVTN)_HBsAg (opt1)
aggagagucccgcagucggcguccagcggcucugcuuguucgugugugugucguugcaggccuuauucaagcuuaccaugaagugggugaccuucaucagccuccuguuccuguucuccagcgccuacucccuguuccaggaguaccagugcuacggcuccagcuccaacacccgggugcucaacgagcugaacuacgacaacgcggggaccaaccuguacaacgagcucgagaugaacuacuacggcaagcaggagaacugguacagccugaagaagaacucccgcagccugggggagaacgacgacggcaacaacgaggacaacgagaagcuccggaagcccaagcacaagaagcugaagcagccggccgacgggaaccccgaccccaacgccaaccccaacguggacccgaacgccaaccccaacgucgaccccaacgccaaccccaacguggacccgaacgcgaaccccaacgccaaccccaacgccaaccccaacgccaacccgaacgcgaaccccaacgccaaccccaacgccaaccccaacgccaacccgaacgccaaccccaacgcgaaccccaacgccaaccccaacgccaacccgaacgccaaccccaacgccaaccccaacgcgaaccccaacgccaacccgaacgccaaccccaacguggaccccaacgccaaccccaacgccaacccgaacgcgaaccccaacgccaaccccaacgccaacccgaacgccaaccccaacgccaaccccaacgcgaaccccaacgccaacccgaacgccaaccccaacgccaaccccaacgcgaaccccaacgccaacccgaacgccaaccccaacgccaaccccaacgccaaccccaacgcgaacccgaacgccaaccccaacaagaacaaccagggcaacggccaggggcacaacaugcccaacgaccccaaccgcaacgucgacgagaacgccaacgccaacuccgccgugaagaacaacaacaacgaggagccgagcgacaagcacaucaaggaguaccugaacaagauccagaacucccucagcacggaguggucccccugcagcgugaccugcggcaacgggauccagguccggaucaagcccggcuccgcgaacaagcccaaggacgagcuggacuacgccaacgacaucgagaagaagaucugcaagauggagaagugcagcuccguguucaacguggucaacagcuccccggugacgaacauggagaacaucaccagcggcuuccuggggccccuccuggugcugcaggccggcuucuuccuccugacccgcauccugaccaucccgcagucccucgacagcugguggaccucccugaacuuccucgggggcagccccgucugccuggggcagaacucccagagccccaccuccaaccacagccccaccuccugcccgcccaucugccccggcuaccgguggaugugccugcgccgguucaucaucuuccuguucauccuccugcugugccucaucuuccugcuggugcuccuggacuaccagggcaugcugcccgugugcccgcucauccccgggagcacgaccaccaacaccggccccugcaagacgugcaccacccccgcccaggggaacuccauguucccgagcugcugcugcaccaagcccacggacggcaacugcacgugcauccccauccccuccagcugggcguucgccaaguaccugugggagugggccuccguccgcuucagcuggcugucccuccuggugccguucgugcagugguucgucgggcugagccccaccguguggcucuccgccaucuggaugaugugguacuggggccccagccuguacagcaucgugucccccuucaucccgcugcuccccaucuucuucugccugugggucuacaucugaggacuagucccuguucccagagcccacuuuuuuuucuuuuuuugaaauaaaauagccugucuuucagaucucaaaggcucuuuucagagccaccaaaaaaaaaaaaaaaaaaaaaaaaaaaaaaaaaaaaaaaaaaaaaaaaaaaaaaaaaaaaaaaaagaauu

SEQ ID NO: 9169 - RNA, 1903 nt, Artificial Sequence
  mRNA Design a-1 (hSL-A64-N5) comprising derived and/or modified sequence from Pf(3D7)__XP_001351122.1__HsALB_Pf-CSP(19-384)_L(SGG)_Ferritin (opt1)
aggagagucccgcagucggcguccagcggcucugcuuguucgugugugugucguugcaggccuuauucaagcuuaccaugaagugggugaccuucaucagccugcucuuccuguucuccagcgccuacucccuguuccaggaguaccagugcuacggcuccagcuccaacacccgggugcucaacgagcugaacuacgacaacgcggggaccaaccuguacaacgagcucgagaugaacuacuacggcaagcaggagaacugguacagccugaagaagaacucccgcagccugggggagaacgacgacggcaacaacgaggacaacgagaagcuccggaagcccaagcacaagaagcugaagcagccggccgacgggaaccccgaccccaacgccaaccccaacguggacccgaacgccaaccccaacgucgaccccaacgccaaccccaacguggacccgaacgcgaaccccaacgccaaccccaacgccaaccccaacgccaacccgaacgcgaaccccaacgccaaccccaacgccaaccccaacgccaacccgaacgccaaccccaacgcgaaccccaacgccaaccccaacgccaacccgaacgccaaccccaacgccaaccccaacgcgaaccccaacgccaacccgaacgccaaccccaacguggaccccaacgccaaccccaacgccaacccgaacgcgaaccccaacgccaaccccaacgccaacccgaacgccaaccccaacgccaaccccaacgcgaaccccaacgccaacccgaacgccaaccccaacgccaaccccaacgcgaaccccaacgccaacccgaacgccaaccccaacgccaaccccaacgccaaccccaacgcgaacccgaacgccaaccccaacaagaacaaccagggcaacggccaggggcacaacaugcccaacgaccccaaccgcaacgucgacgagaacgccaacgccaacuccgccgugaagaacaacaacaacgaggagccgagcgacaagcacaucaaggaguaccugaacaagauccagaacucccucagcacggaguggucccccugcagcgugaccugcggcaacgggauccagguccggaucaagcccggcuccgcgaacaagcccaaggacgagcuggacuacgccaacgacaucgagaagaagaucugcaagauggagaagugcagcuccguguucaacguggucaacagcuccagcggcgggcugagcaaggacaucaucaagcuccugaacgagcaggugaacaaggagaugaacuccagcaaccuguacauguccaugagcuccuggugcuacacccacagccucgacggcgccgggcuguuccuguucgaccacgccgcggaggaguacgagcacgccaagaagcucaucaucuuccugaacgagaacaacguccccgugcagcugaccuccaucagcgccccggagcacaaguucgagggccucacgcagaucuuccagaaggccuacgagcacgagcagcacaucuccgagagcaucaacaacaucguggaccacgccaucaaguccaaggaccacgcgaccuucaacuuccugcagugguacgucgccgagcagcacgaggaggaggugcuguucaaggacauccucgacaagaucgagcugaucgggaacgagaaccacggccuguaccucgccgaccaguacgugaaggggaucgccaagagccgcaaguccugaggacuagucccuguucccagagcccacuuuuuuuucuuuuuuugaaauaaaauagccugucuuucagaucucaaaggcucuuuucagagccaccaaaaaaaaaaaaaaaaaaaaaaaaaaaaaaaaaaaaaaaaaaaaaaaaaaaaaaaaaaaaaaaaagaauu

SEQ ID NO: 9170 - RNA, 1903 nt, Artificial Sequence
  mRNA Design a-1 (hSL-A64-N5) comprising derived and/or modified sequence from Pf(3D7)__XP_001351122.1__HsALB_Pf-CSP(19-384)_L(SGG)_Ferritin (opt1)
aggagagucccgcagucggcguccagcggcucugcuuguucgugugugugucguugcaggccuuauucaagcuuaccaugaagugggugaccuucaucagccuccuguuccuguucuccagcgccuacucccuguuccaggaguaccagugcuacggcuccagcuccaacacccgggugcucaacgagcugaacuacgacaacgcggggaccaaccuguacaacgagcucgagaugaacuacuacggcaagcaggagaacugguacagccugaagaagaacucccgcagccugggggagaacgacgacggcaacaacgaggacaacgagaagcuccggaagcccaagcacaagaagcugaagcagccggccgacgggaaccccgaccccaacgccaaccccaacguggacccgaacgccaaccccaacgucgaccccaacgccaaccccaacguggacccgaacgcgaaccccaacgccaaccccaacgccaaccccaacgccaacccgaacgcgaaccccaacgccaaccccaacgccaaccccaacgccaacccgaacgccaaccccaacgcgaaccccaacgccaaccccaacgccaacccgaacgccaaccccaacgccaaccccaacgcgaaccccaacgccaacccgaacgccaaccccaacguggaccccaacgccaaccccaacgccaacccgaacgcgaaccccaacgccaaccccaacgccaacccgaacgccaaccccaacgccaaccccaacgcgaaccccaacgccaacccgaacgccaaccccaacgccaaccccaacgcgaaccccaacgccaacccgaacgccaaccccaacgccaaccccaacgccaaccccaacgcgaacccgaacgccaaccccaacaagaacaaccagggcaacggccaggggcacaacaugcccaacgaccccaaccgcaacgucgacgagaacgccaacgccaacuccgccgugaagaacaacaacaacgaggagccgagcgacaagcacaucaaggaguaccugaacaagauccagaacucccucagcacggaguggucccccugcagcgugaccugcggcaacgggauccagguccggaucaagcccggcuccgcgaacaagcccaaggacgagcuggacuacgccaacgacaucgagaagaagaucugcaagauggagaagugcagcuccguguucaacguggucaacagcuccagcggcgggcugagcaaggacaucaucaagcuccugaacgagcaggugaacaaggagaugaacuccagcaaccuguacauguccaugagcuccuggugcuacacccacagccucgacggcgccgggcuguuccuguucgaccacgccgcggaggaguacgagcacgccaagaagcucaucaucuuccugaacgagaacaacguccccgugcagcugaccuccaucagcgccccggagcacaaguucgagggccucacgcagaucuuccagaaggccuacgagcacgagcagcacaucuccgagagcaucaacaacaucguggaccacgccaucaaguccaaggaccacgcgaccuucaacuuccugcagugguacgucgccgagcagcacgaggaggaggugcuguucaaggacauccucgacaagaucgagcugaucgggaacgagaaccacggccuguaccucgccgaccaguacgugaaggggaucgccaagagccgcaaguccugaggacuagucccuguucccagagcccacuuuuuuuucuuuuuuugaaauaaaauagccugucuuucagaucucaaaggcucuuuucagagccaccaaaaaaaaaaaaaaaaaaaaaaaaaaaaaaaaaaaaaaaaaaaaaaaaaaaaaaaaaaaaaaaaagaauu

SEQ ID NO: 9171 - RNA, 1864 nt, Artificial Sequence
  mRNA Design a-1 (hSL-A64-N5) comprising derived and/or modified sequence from Pf(3D7)__XP_001351122.1__HsALB_Pf-CSP(93-384)_L(PVTN)_HBsAg (opt1)
aggagagucccgcagucggcguccagcggcucugcuuguucgugugugugucguugcaggccuuauucaagcuuaccaugaagugggugaccuucaucagccugcucuuccuguucuccagcgccuacuccaagcugaagcagccggccgacgggaaccccgaccccaacgccaaccccaacguggacccgaacgccaaccccaacgucgaccccaacgccaaccccaacguggacccgaacgcgaaccccaacgccaaccccaacgccaaccccaacgccaacccgaacgcgaaccccaacgccaaccccaacgccaaccccaacgccaacccgaacgccaaccccaacgcgaaccccaacgccaaccccaacgccaacccgaacgccaaccccaacgccaaccccaacgcgaaccccaacgccaacccgaacgccaaccccaacguggaccccaacgccaaccccaacgccaacccgaacgcgaaccccaacgccaaccccaacgccaacccgaacgccaaccccaacgccaaccccaacgcgaaccccaacgccaacccgaacgccaaccccaacgccaaccccaacgcgaaccccaacgccaacccgaacgccaaccccaacgccaaccccaacgccaaccccaacgcgaacccgaacgccaaccccaacaagaacaaccagggcaacggccaggggcacaacaugcccaacgaccccaaccgcaacgucgacgagaacgccaacgccaacuccgccgugaagaacaacaacaacgaggagccgagcgacaagcacaucaaggaguaccugaacaagauccagaacucccucagcacggaguggucccccugcagcgugaccugcggcaacgggauccagguccggaucaagcccggcuccgcgaacaagcccaaggacgagcuggacuacgccaacgacaucgagaagaagaucugcaagauggagaagugcagcuccguguucaacguggucaacagcuccccggugacgaacauggagaacaucaccagcggcuuccuggggccccuccuggugcugcaggccggcuucuuccuccugacccgcauccugaccaucccgcagucccucgacagcugguggaccucccugaacuuccucgggggcagccccgucugccuggggcagaacucccagagccccaccuccaaccacagccccaccuccugcccgcccaucugccccggcuaccgguggaugugccugcgccgguucaucaucuuccuguucauccuccugcugugccucaucuuccugcuggugcuccuggacuaccagggcaugcugcccgugugcccgcucauccccgggagcacgaccaccaacaccggccccugcaagacgugcaccacccccgcccaggggaacuccauguucccgagcugcugcugcaccaagcccacggacggcaacugcacgugcauccccauccccuccagcugggcguucgccaaguaccugugggagugggccuccguccgcuucagcuggcugucccuccuggugccguucgugcagugguucgucgggcugagccccaccguguggcucuccgccaucuggaugaugugguacuggggccccagccuguacagcaucgugucccccuucaucccgcugcuccccaucuucuucugccugugggucuacaucugaggacuagucccuguucccagagcccacuuuuuuuucuuuuuuugaaauaaaauagccugucuuucagaucucaaaggcucuuuucagagccaccaaaaaaaaaaaaaaaaaaaaaaaaaaaaaaaaaaaaaaaaaaaaaaaaaaaaaaaaaaaaaaaaagaauu

SEQ ID NO: 9172 - RNA, 1864 nt, Artificial Sequence
  mRNA Design a-1 (hSL-A64-N5) comprising derived and/or modified sequence from Pf(3D7)__XP_001351122.1__HsALB_Pf-CSP(93-384)_L(PVTN)_HBsAg (opt1)
aggagagucccgcagucggcguccagcggcucugcuuguucgugugugugucguugcaggccuuauucaagcuuaccaugaagugggugaccuucaucagccuccuguuccuguucuccagcgccuacuccaagcugaagcagccggccgacgggaaccccgaccccaacgccaaccccaacguggacccgaacgccaaccccaacgucgaccccaacgccaaccccaacguggacccgaacgcgaaccccaacgccaaccccaacgccaaccccaacgccaacccgaacgcgaaccccaacgccaaccccaacgccaaccccaacgccaacccgaacgccaaccccaacgcgaaccccaacgccaaccccaacgccaacccgaacgccaaccccaacgccaaccccaacgcgaaccccaacgccaacccgaacgccaaccccaacguggaccccaacgccaaccccaacgccaacccgaacgcgaaccccaacgccaaccccaacgccaacccgaacgccaaccccaacgccaaccccaacgcgaaccccaacgccaacccgaacgccaaccccaacgccaaccccaacgcgaaccccaacgccaacccgaacgccaaccccaacgccaaccccaacgccaaccccaacgcgaacccgaacgccaaccccaacaagaacaaccagggcaacggccaggggcacaacaugcccaacgaccccaaccgcaacgucgacgagaacgccaacgccaacuccgccgugaagaacaacaacaacgaggagccgagcgacaagcacaucaaggaguaccugaacaagauccagaacucccucagcacggaguggucccccugcagcgugaccugcggcaacgggauccagguccggaucaagcccggcuccgcgaacaagcccaaggacgagcuggacuacgccaacgacaucgagaagaagaucugcaagauggagaagugcagcuccguguucaacguggucaacagcuccccggugacgaacauggagaacaucaccagcggcuuccuggggccccuccuggugcugcaggccggcuucuuccuccugacccgcauccugaccaucccgcagucccucgacagcugguggaccucccugaacuuccucgggggcagccccgucugccuggggcagaacucccagagccccaccuccaaccacagccccaccuccugcccgcccaucugccccggcuaccgguggaugugccugcgccgguucaucaucuuccuguucauccuccugcugugccucaucuuccugcuggugcuccuggacuaccagggcaugcugcccgugugcccgcucauccccgggagcacgaccaccaacaccggccccugcaagacgugcaccacccccgcccaggggaacuccauguucccgagcugcugcugcaccaagcccacggacggcaacugcacgugcauccccauccccuccagcugggcguucgccaaguaccugugggagugggccuccguccgcuucagcuggcugucccuccuggugccguucgugcagugguucgucgggcugagccccaccguguggcucuccgccaucuggaugaugugguacuggggccccagccuguacagcaucgugucccccuucaucccgcugcuccccaucuucuucugccugugggucuacaucugaggacuagucccuguucccagagcccacuuuuuuuucuuuuuuugaaauaaaauagccugucuuucagaucucaaaggcucuuuucagagccaccaaaaaaaaaaaaaaaaaaaaaaaaaaaaaaaaaaaaaaaaaaaaaaaaaaaaaaaaaaaaaaaaagaauu

SEQ ID NO: 9173 - RNA, 1525 nt, Artificial Sequence; identical to SEQ ID NO: 6587
  mRNA Design a-1 (hSL-A64-N5) comprising derived and/or modified sequence from Pf(3D7)__XP_001351122.1__HsALB_Pf-CSP(199-377)_L(PVTN)_HBsAg (opt1)

SEQ ID NO: 9174 - RNA, 1222 nt, Artificial Sequence
  mRNA Design a-1 (hSL-A64-N5) comprising derived and/or modified sequence from Pf(3D7)__XP_001351122.1__HsALB_Pf-CSP(19-272)_L(AAY)_Pf-CSP(310-3 27)_L(AAY)_Pf-CSP(346-375) (opt1)
aggagagucccgcagucggcguccagcggcucugcuuguucgugugugugucguugcaggccuuauucaagcuuaccaugaagugggugaccuucaucagccuccuguuccuguucuccagcgccuacucccuguuccaggaguaccagugcuacggcuccagcuccaacacccgggugcucaacgagcugaacuacgacaacgcggggaccaaccuguacaacgagcucgagaugaacuacuacggcaagcaggagaacugguacagccugaagaagaacucccgcagccugggggagaacgacgacggcaacaacgaggacaacgagaagcuccggaagcccaagcacaagaagcugaagcagccggccgacgggaaccccgaccccaacgccaaccccaacguggacccgaacgccaaccccaacgucgaccccaacgccaaccccaacguggacccgaacgcgaaccccaacgccaaccccaacgccaaccccaacgccaacccgaacgcgaaccccaacgccaaccccaacgccaaccccaacgccaacccgaacgccaaccccaacgcgaaccccaacgccaaccccaacgccaacccgaacgccaaccccaacgccaaccccaacgcgaaccccaacgccaacccgaacgccaaccccaacguggaccccaacgccaaccccaacgccaacccgaacgcgaaccccaacgccaaccccaacgccaacccgaacgccaaccccaacgccaaccccaacgcgaaccccaacgccaacccgaacgccaaccccaacgccaaccccaacgcgaaccccaacgccaacccgaacgccaaccccaacgccaaccccaacgccaaccccaacgcgaacccgaacgccaaccccgccgcguaugagccgagcgacaagcacaucaaggaguaccugaacaagauccagaacucccucgcggccuacaucaagcccggcuccgcgaacaagcccaaggacgagcuggacuacgccaacgacaucgagaagaagaucugcaagauggagaagugcagcugaggacuagucccuguucccagagcccacuuuuuuuucuuuuuuugaaauaaaauagccugucuuucagaucucaaaggcucuuuucagagccaccaaaaaaaaaaaaaaaaaaaaaaaaaaaaaaaaaaaaaaaaaaaaaaaaaaaaaaaaaaaaaaaaagaauu

SEQ ID NO: 9175 - RNA, 1222 nt, Artificial Sequence
  mRNA Design a-1 (hSL-A64-N5) comprising derived and/or modified sequence from Pf(3D7)__XP_001351122.1__HsALB_Pf-CSP(19-272)_L(AAY)_Pf-CSP(346-3 75)_L(AAY)_Pf-CSP(310-327) (opt1)
aggagagucccgcagucggcguccagcggcucugcuuguucgugugugugucguugcaggccuuauucaagcuuaccaugaagugggugaccuucaucagccuccuguuccuguucuccagcgccuacucccuguuccaggaguaccagugcuacggcuccagcuccaacacccgggugcucaacgagcugaacuacgacaacgcggggaccaaccuguacaacgagcucgagaugaacuacuacggcaagcaggagaacugguacagccugaagaagaacucccgcagccugggggagaacgacgacggcaacaacgaggacaacgagaagcuccggaagcccaagcacaagaagcugaagcagccggccgacgggaaccccgaccccaacgccaaccccaacguggacccgaacgccaaccccaacgucgaccccaacgccaaccccaacguggacccgaacgcgaaccccaacgccaaccccaacgccaaccccaacgccaacccgaacgcgaaccccaacgccaaccccaacgccaaccccaacgccaacccgaacgccaaccccaacgcgaaccccaacgccaaccccaacgccaacccgaacgccaaccccaacgccaaccccaacgcgaaccccaacgccaacccgaacgccaaccccaacguggaccccaacgccaaccccaacgccaacccgaacgcgaaccccaacgccaaccccaacgccaacccgaacgccaaccccaacgccaaccccaacgcgaaccccaacgccaacccgaacgccaaccccaacgccaaccccaacgcgaaccccaacgccaacccgaacgccaaccccaacgccaaccccaacgccaaccccaacgcgaacccgaacgccaaccccgcggccuacaucaagcccggcuccgcgaacaagcccaaggacgagcuggacuacgccaacgacaucgagaagaagaucugcaagauggagaagugcagcgccgcguaugagccgagcgacaagcacaucaaggaguaccugaacaagauccagaacucccucugaggacuagucccuguucccagagcccacuuuuuuuucuuuuuuugaaauaaaauagccugucuuucagaucucaaaggcucuuuucagagccaccaaaaaaaaaaaaaaaaaaaaaaaaaaaaaaaaaaaaaaaaaaaaaaaaaaaaaaaaaaaaaaaaagaauu

SEQ ID NO: 9176 - RNA, 1270 nt, Artificial Sequence
  mRNA Design a-1 (hSL-A64-N5) comprising derived and/or modified sequence from Pf(3D7)__XP_001351122.1__HsALB_Pf-CSP(19-272)_L(AAY)_Pf-CSP(346-3 75)_L(AAY)_Pf-CSP(310-327)_L(AAY)_PADRE (opt1)
aggagagucccgcagucggcguccagcggcucugcuuguucgugugugugucguugcaggccuuauucaagcuuaccaugaagugggugaccuucaucagccuccuguuccuguucuccagcgccuacucccuguuccaggaguaccagugcuacggcuccagcuccaacacccgggugcucaacgagcugaacuacgacaacgcggggaccaaccuguacaacgagcucgagaugaacuacuacggcaagcaggagaacugguacagccugaagaagaacucccgcagccugggggagaacgacgacggcaacaacgaggacaacgagaagcuccggaagcccaagcacaagaagcugaagcagccggccgacgggaaccccgaccccaacgccaaccccaacguggacccgaacgccaaccccaacgucgaccccaacgccaaccccaacguggacccgaacgcgaaccccaacgccaaccccaacgccaaccccaacgccaacccgaacgcgaaccccaacgccaaccccaacgccaaccccaacgccaacccgaacgccaaccccaacgcgaaccccaacgccaaccccaacgccaacccgaacgccaaccccaacgccaaccccaacgcgaaccccaacgccaacccgaacgccaaccccaacguggaccccaacgccaaccccaacgccaacccgaacgcgaaccccaacgccaaccccaacgccaacccgaacgccaaccccaacgccaaccccaacgcgaaccccaacgccaacccgaacgccaaccccaacgccaaccccaacgcgaaccccaacgccaacccgaacgccaaccccaacgccaaccccaacgccaaccccaacgcgaacccgaacgccaaccccgccgcguauaucaagcccggcuccgcgaacaagcccaaggacgagcuggacuacgccaacgacaucgagaagaagaucugcaagauggagaagugcagcgcggccuacgagccgagcgacaagcacaucaaggaguaccugaacaagauccagaacucccucgccgccuacgccaaguucguggccgccuggacccugaaggcggccgccugaggacuagucccuguucccagagcccacuuuuuuuucuuuuuuugaaauaaaauagccugucuuucagaucucaaaggcucuuuucagagccaccaaaaaaaaaaaaaaaaaaaaaaaaaaaaaaaaaaaaaaaaaaaaaaaaaaaaaaaaaaaaaaaaagaauu

SEQ ID NO: 9177 - RNA, 1270 nt, Artificial Sequence
  mRNA Design a-1 (hSL-A64-N5) comprising derived and/or modified sequence from Pf(3D7)__XP_001351122.1__HsALB_Pf-CSP(19-272)_L(AAY)_Pf-CSP(310-3 27)_L(AAY)_Pf-CSP(346-375)_L(AAY)_PADRE (opt1)
aggagagucccgcagucggcguccagcggcucugcuuguucgugugugugucguugcaggccuuauucaagcuuaccaugaagugggugaccuucaucagccuccuguuccuguucuccagcgccuacucccuguuccaggaguaccagugcuacggcuccagcuccaacacccgggugcucaacgagcugaacuacgacaacgcggggaccaaccuguacaacgagcucgagaugaacuacuacggcaagcaggagaacugguacagccugaagaagaacucccgcagccugggggagaacgacgacggcaacaacgaggacaacgagaagcuccggaagcccaagcacaagaagcugaagcagccggccgacgggaaccccgaccccaacgccaaccccaacguggacccgaacgccaaccccaacgucgaccccaacgccaaccccaacguggacccgaacgcgaaccccaacgccaaccccaacgccaaccccaacgccaacccgaacgcgaaccccaacgccaaccccaacgccaaccccaacgccaacccgaacgccaaccccaacgcgaaccccaacgccaaccccaacgccaacccgaacgccaaccccaacgccaaccccaacgcgaaccccaacgccaacccgaacgccaaccccaacguggaccccaacgccaaccccaacgccaacccgaacgcgaaccccaacgccaaccccaacgccaacccgaacgccaaccccaacgccaaccccaacgcgaaccccaacgccaacccgaacgccaaccccaacgccaaccccaacgcgaaccccaacgccaacccgaacgccaaccccaacgccaaccccaacgccaaccccaacgcgaacccgaacgccaaccccgccgcguaugagccgagcgacaagcacaucaaggaguaccugaacaagauccagaacucccucgcggccuacaucaagcccggcuccgcgaacaagcccaaggacgagcuggacuacgccaacgacaucgagaagaagaucugcaagauggagaagugcagcgccgccuacgccaaguucguggccgccuggacccugaaggcggccgccugaggacuagucccuguucccagagcccacuuuuuuuucuuuuuuugaaauaaaauagccugucuuucagaucucaaaggcucuuuucagagccaccaaaaaaaaaaaaaaaaaaaaaaaaaaaaaaaaaaaaaaaaaaaaaaaaaaaaaaaaaaaaaaaaagaauu

SEQ ID NO: 9178 - RNA, 1324 nt, Artificial Sequence
  mRNA Design a-1 (hSL-A64-N5) comprising derived and/or modified sequence from Pf(3D7)__XP_001351122.1__HsALB_Pf-CSP(19-272)_L(AAY)_Pf-CSP(310-3 27)_L(AAY)_Pf-CSP(346-375)_L(AAY)_PADRE_L(AAY)_P2 (opt1)
aggagagucccgcagucggcguccagcggcucugcuuguucgugugugugucguugcaggccuuauucaagcuuaccaugaagugggugaccuucaucagccuccuguuccuguucuccagcgccuacucccuguuccaggaguaccagugcuacggcuccagcuccaacacccgggugcucaacgagcugaacuacgacaacgcggggaccaaccuguacaacgagcucgagaugaacuacuacggcaagcaggagaacugguacagccugaagaagaacucccgcagccugggggagaacgacgacggcaacaacgaggacaacgagaagcuccggaagcccaagcacaagaagcugaagcagccggccgacgggaaccccgaccccaacgccaaccccaacguggacccgaacgccaaccccaacgucgaccccaacgccaaccccaacguggacccgaacgcgaaccccaacgccaaccccaacgccaaccccaacgccaacccgaacgcgaaccccaacgccaaccccaacgccaaccccaacgccaacccgaacgccaaccccaacgcgaaccccaacgccaaccccaacgccaacccgaacgccaaccccaacgccaaccccaacgcgaaccccaacgccaacccgaacgccaaccccaacguggaccccaacgccaaccccaacgccaacccgaacgcgaaccccaacgccaaccccaacgccaacccgaacgccaaccccaacgccaaccccaacgcgaaccccaacgccaacccgaacgccaaccccaacgccaaccccaacgcgaaccccaacgccaacccgaacgccaaccccaacgccaaccccaacgccaaccccaacgcgaacccgaacgccaaccccgcggccuacgagccgagcgacaagcacaucaaggaguaccugaacaagauccagaacucccucgccgcguauaucaagcccggcuccgcgaacaagcccaaggacgagcuggacuacgccaacgacaucgagaagaagaucugcaagauggagaagugcagcgccgccuacgccaaguucguggccgccuggacccugaaggcggccgccgccgcuuaccaguacaucaaggccaacagcaaguucaucggcaucaccgagcugugaggacuagucccuguucccagagcccacuuuuuuuucuuuuuuugaaauaaaauagccugucuuucagaucucaaaggcucuuuucagagccaccaaaaaaaaaaaaaaaaaaaaaaaaaaaaaaaaaaaaaaaaaaaaaaaaaaaaaaaaaaaaaaaaagaauu

SEQ ID NO: 9179 - RNA, 1288 nt, Artificial Sequence
  mRNA Design a-1 (hSL-A64-N5) comprising derived and/or modified sequence from Pf(3D7)__XP_001351122.1__HsALB_Pf-CSP(19-272)_L(AAY)_Pf-CSP(310-3 27)_Linker (AAY)_Pf-CSP(346-397) (opt1)
aggagagucccgcagucggcguccagcggcucugcuuguucgugugugugucguugcaggccuuauucaagcuuaccaugaagugggugaccuucaucagccuccuguuccuguucuccagcgccuacucccuguuccaggaguaccagugcuacggcuccagcuccaacacccgggugcucaacgagcugaacuacgacaacgcggggaccaaccuguacaacgagcucgagaugaacuacuacggcaagcaggagaacugguacagccugaagaagaacucccgcagccugggggagaacgacgacggcaacaacgaggacaacgagaagcuccggaagcccaagcacaagaagcugaagcagccggccgacgggaaccccgaccccaacgccaaccccaacguggacccgaacgccaaccccaacgucgaccccaacgccaaccccaacguggacccgaacgcgaaccccaacgccaaccccaacgccaaccccaacgccaacccgaacgcgaaccccaacgccaaccccaacgccaaccccaacgccaacccgaacgccaaccccaacgcgaaccccaacgccaaccccaacgccaacccgaacgccaaccccaacgccaaccccaacgcgaaccccaacgccaacccgaacgccaaccccaacguggaccccaacgccaaccccaacgccaacccgaacgcgaaccccaacgccaaccccaacgccaacccgaacgccaaccccaacgccaaccccaacgcgaaccccaacgccaacccgaacgccaaccccaacgccaaccccaacgcgaaccccaacgccaacccgaacgccaaccccaacgccaaccccaacgccaaccccaacgcgaacccgaacgccaaccccgcggccuacgagccgagcgacaagcacaucaaggaguaccugaacaagauccagaacucccucgccgcguauaucaagcccggcuccgcgaacaagcccaaggacgagcuggacuacgccaacgacaucgagaagaagaucugcaagauggagaagugcagcuccguguucaacguggucaacagcuccaucgggcugaucauggugcucagcuuccuguuccugaacugaggacuagucccuguucccagagcccacuuuuuuuucuuuuuuugaaauaaaauagccugucuuucagaucucaaaggcucuuuucagagccaccaaaaaaaaaaaaaaaaaaaaaaaaaaaaaaaaaaaaaaaaaaaaaaaaaaaaaaaaaaaaaaaaagaauu

SEQ ID NO: 9180 - RNA, 1888 nt, Artificial Sequence
  mRNA Design a-1 (hSL-A64-N5) comprising derived and/or modified sequence from Pf(3D7)__XP_001351122.1__LumSynt_L(GGS4-GGG)_Pf-CSP(19-397) (opt1)
aggagagucccgcagucggcguccagcggcucugcuuguucgugugugugucguugcaggccuuauucaagcuuaccaugcagaucuacgagggcaagcugaccgccgaggggcuccgcuucggcaucguggccagccgguucaaccacgcgcuggucgaccgccugguggagggggccaucgacgccaucgugcggcacggcgggcgcgaggaggacaucacccucguccgggugcccggcuccugggagaucccgguggccgccggcgagcuggcgcgcaaggaggacaucgacgccgucaucgccaucggggugcugauccggggcgccacgccccacuucgacuacaucgcgagcgagguguccaaggggcucgccgaccugagccuggagcuccgcaagcccaucaccuucggcgucaucaccgccgacacccuggagcaggccaucgagcgggccgggacgaagcacggcaacaagggcugggaggcggcccuguccgccaucgagauggccaaccucuucaagagccugcgcgggggcuccgggggcagcggcggguccggcgggagcggcgggggccuguuccaggaguaccagugcuacggcuccagcuccaacacccgggugcucaacgagcugaacuacgacaacgccgggaccaaccuguacaacgagcucgagaugaacuacuacggcaagcaggagaacugguacagccugaagaagaacucccgcagccugggggagaacgacgacggcaacaacgaggacaacgagaagcuccggaagcccaagcacaagaagcugaagcagccggcggacgggaaccccgaccccaacgccaaccccaacguggacccgaacgccaaccccaacgucgaccccaacgccaaccccaacguggacccgaacgccaaccccaacgcgaaccccaacgccaaccccaacgccaacccgaacgccaaccccaacgccaaccccaacgcgaaccccaacgccaacccgaacgccaaccccaacgccaaccccaacgcgaaccccaacgccaacccgaacgccaaccccaacgccaaccccaacgccaaccccaacgcgaacccgaacgccaaccccaacguggaccccaacgccaacccgaacgccaaccccaacgccaaccccaacgcgaaccccaacgccaacccgaacgccaaccccaacgccaaccccaacgccaaccccaacgcgaacccgaacgccaaccccaacgccaaccccaacgccaaccccaacgcgaacccgaacgccaaccccaacgccaaccccaacgccaaccccaacgccaacccgaacgcgaaccccaacaagaacaaccagggcaacggccaggggcacaacaugcccaacgaccccaaccgcaacgucgacgagaacgccaacgccaacuccgccgugaagaacaacaacaacgaggagccgagcgacaagcacaucaaggaguaccugaacaagauccagaacucccucagcaccgaguggagccccugcuccgugacgugcggcaacgggauccagguccggaucaagcccggcagcgccaacaagcccaaggacgagcuggacuacgcgaacgacaucgagaagaagaucugcaagauggagaagugcuccagcguguucaacguggucaacuccagcaucgggcugaucauggugcucuccuuccuguuccugaacugaggacuagucccuguucccagagcccacuuuuuuuucuuuuuuugaaauaaaauagccugucuuucagaucucaaaggcucuuuucagagccaccaaaaaaaaaaaaaaaaaaaaaaaaaaaaaaaaaaaaaaaaaaaaaaaaaaaaaaaaaaaaaaaaagaauu

SEQ ID NO: 9181 - RNA, 1750 nt, Artificial Sequence
  mRNA Design a-1 (hSL-A64-N5) comprising derived and/or modified sequence from Pf(3D7)__XP_001351122.1__HsALB_Pf-CSP(19-272)_L(PVTN)_HBsAg (opt1)
aggagagucccgcagucggcguccagcggcucugcuuguucgugugugugucguugcaggccuuauucaagcuuaccaugaagugggugaccuucaucagccuccuguuccuguucuccagcgccuacucccuguuccaggaguaccagugcuacggcagcuccagcaacacccgcguccucaacgagcugaacuacgacaacgccgggaccaaccuguacaacgagcucgagaugaacuacuacggcaagcaggagaacugguacucccugaagaagaacagccggucccugggggagaacgacgacggcaacaacgaggacaacgagaagcuccgcaagcccaagcacaagaagcugaagcagccggcggacgggaaccccgaccccaacgccaaccccaacguggacccgaacgccaaccccaacguggaccccaacgccaaccccaacgucgacccgaacgccaaccccaacgcgaaccccaacgccaaccccaacgccaacccgaacgccaaccccaacgcgaaccccaacgccaaccccaacgccaacccgaacgccaaccccaacgccaaccccaacgcgaaccccaacgccaacccgaacgccaaccccaacgccaaccccaacgccaaccccaacgcgaacccgaacgccaaccccaacguggaccccaacgccaaccccaacgccaacccgaacgccaaccccaacgcgaaccccaacgccaacccgaacgccaaccccaacgccaaccccaacgccaaccccaacgcgaacccgaacgccaaccccaacgccaaccccaacgccaaccccaacgcgaacccgaacgccaaccccaacgccaaccccaacgccaaccccaacgccaacccgaacgcgaacccgcccgugaccaacauggagaacaucaccagcggcuuccugggcccccuccugguccugcaggccggguucuuccuccugacccggauccugacgaucccccagucccucgacagcugguggaccucccugaacuuccugggcgggagccccgugugccucggccagaacucccagagccccaccuccaaccacagccccaccuccugcccgcccaucugccccggguaccgcuggaugugccugcggcgcuucaucaucuuccuguucauccuccugcugugccucaucuuccugcuggugcuccuggacuaccagggcaugcugcccgucugcccgcucauccccggcagcacgaccaccaacaccgggcccugcaagacgugcaccaccccggcccagggcaacagcauguuccccuccugcugcugcaccaagcccacggacgggaacugcacgugcauccccaucccgagcuccugggccuucgccaaguaccugugggagugggcgagcgugcgguucuccuggcugagccuccuggugcccuucguccagugguucgugggccugucccccaccguguggcucagcgccaucuggaugaugugguacuggggccccucccuguacagcaucgucuccccguucaucccccugcuccccaucuucuucugccuguggguguacaucugaggacuagucccuguucccagagcccacuuuuuuuucuuuuuuugaaauaaaauagccugucuuucagaucucaaaggcucuuuucagagccaccaaaaaaaaaaaaaaaaaaaaaaaaaaaaaaaaaaaaaaaaaaaaaaaaaaaaaaaaaaaaaaaaagaauu

SEQ ID NO: 9182 - RNA, 1867 nt, Artificial Sequence
  mRNA Design a-1 (hSL-A64-N5) comprising derived and/or modified sequence from Pf(3D7)__XP_001351122.1__HsALB_Pf-CSP(19-272)_L(AAY)_Pf-CSP(346-3 65)_L(AAY)_PADRE_L(PVTN)_HBsAg (opt1)
aggagagucccgcagucggcguccagcggcucugcuuguucgugugugugucguugcaggccuuauucaagcuuaccaugaagugggugaccuucaucagccugcuguuccuguucuccagcgccuacucccuguuccaggaguaccagugcuacggcagcuccagcaacacccgcguccucaacgagcugaacuacgacaacgccgggaccaaccuguacaacgagcucgagaugaacuacuacggcaagcaggagaacugguacucccugaagaagaacagccggucccugggggagaacgacgacggcaacaacgaggacaacgagaagcuccgcaagcccaagcacaagaagcugaagcagccggcggacgggaaccccgaccccaacgccaaccccaacguggacccgaacgccaaccccaacguggaccccaacgccaaccccaacgucgacccgaacgccaaccccaacgcgaaccccaacgccaaccccaacgccaacccgaacgccaaccccaacgcgaaccccaacgccaaccccaacgccaacccgaacgccaaccccaacgccaaccccaacgcgaaccccaacgccaacccgaacgccaaccccaacgccaaccccaacgccaaccccaacgcgaacccgaacgccaaccccaacguggaccccaacgccaaccccaacgccaacccgaacgccaaccccaacgcgaaccccaacgccaacccgaacgccaaccccaacgccaaccccaacgccaaccccaacgcgaacccgaacgccaaccccaacgccaaccccaacgccaaccccaacgcgaacccgaacgccaaccccaacgccaaccccaacgccaaccccaacgccaacccgaacgcgaaccccgccgccuacaucaagcccggcagcgccaacaagcccaaggacgagcuggacuacgccaacgacaucgaggcggccuacgccaaguucguggccgccuggacccucaaggcggccgccccggucaccaacauggagaacaucaccuccggcuuccuggggccccugcucgugcugcaggccggcuucuuccugcucacgcggauccugaccaucccccagagccuggacuccugguggaccagccucaacuuccucgggggcucccccgugugccuggggcagaacagccaguccccgaccagcaaccacucccccacgagcugcccgcccaucugccccggcuaccgcuggaugugccuccggcgcuucaucaucuuccuguucauccugcuccugugccugaucuuccuccugguccugcucgacuaccagggcaugcugcccgugugcccccugaucccggggagcaccaccaccaacacgggccccugcaagaccugcaccacccccgcgcaggggaacuccauguuccccagcugcugcugcacgaagccgaccgacggcaacugcacgugcauccccauccccuccagcugggccuucgccaaguaccucugggagugggccuccgugcgguucagcuggcugucccugcucguccccuucgugcagugguucgugggccugagcccgaccgucuggcuguccgccaucuggaugaugugguacugggggcccagccucuacuccaucgugagccccuucaucccccugcugccgaucuucuucugccucuggguguacaucugaggacuagucccuguucccagagcccacuuuuuuuucuuuuuuugaaauaaaauagccugucuuucagaucucaaaggcucuuuucagagccaccaaaaaaaaaaaaaaaaaaaaaaaaaaaaaaaaaaaaaaaaaaaaaaaaaaaaaaaaaaaaaaaaagaauu

SEQ ID NO: 9183 - RNA, 2086 nt, Artificial Sequence
  mRNA Design a-1 (hSL-A64-N5) comprising derived and/or modified sequence from Pf(3D7)__XP_001351122.1__HsALB_Pf-CSP(19-384)_L(PVTN)_HBsAg (opt1)
aggagagucccgcagucggcguccagcggcucugcuuguucgugugugugucguugcaggccuuauucaagcuuaccaugaagugggugaccuucaucagccugcuguuccuguucuccagcgccuacucccuguuccaggaguaccagugcuacggcagcuccagcaacacccgcguccucaacgagcugaacuacgacaacgccgggacgaaccuguacaacgagcucgagaugaacuacuacggcaagcaggagaacugguacucccugaagaagaacagccggucccugggggagaacgacgacggcaacaacgaggacaacgagaagcuccgcaagcccaagcacaagaagcugaagcagccggcggacgggaaccccgaccccaacgccaaccccaacguggacccgaacgccaaccccaacguggaccccaacgccaaccccaacgucgacccgaacgccaaccccaacgcgaaccccaacgccaaccccaacgccaacccgaacgccaaccccaacgcgaaccccaacgccaaccccaacgccaacccgaacgccaaccccaacgccaaccccaacgcgaaccccaacgccaacccgaacgccaaccccaacgccaaccccaacgccaaccccaacgcgaacccgaacgccaaccccaacguggaccccaacgccaaccccaacgccaacccgaacgccaaccccaacgcgaaccccaacgccaacccgaacgccaaccccaacgccaaccccaacgccaaccccaacgcgaacccgaacgccaaccccaacgccaaccccaacgccaaccccaacgcgaacccgaacgccaaccccaacgccaaccccaacgccaaccccaacgccaacccgaacgcgaaccccaacaagaacaaccagggcaacggccaggggcacaacaugcccaacgaccccaaccggaacguggacgagaacgccaacgccaacagcgccgucaagaacaacaacaacgaggagccguccgacaagcacaucaaggaguaccugaacaagauccagaacagccucuccaccgaguggagccccugcuccgugaccugcggcaacgggauccaggugcgcaucaagcccggcagcgccaacaagcccaaggacgagcuggacuacgcgaacgacaucgagaagaagaucugcaagauggagaagugcuccagcgucuucaacguggugaacuccagcccggucaccaacauggagaacaucacgagcggguuccugggcccccuccuggugcugcaggccggcuucuuccuccugacccggauccugaccaucccccagucccucgacagcugguggaccucccugaacuuccucgggggcagccccgugugccucgggcagaacucccagagcccgacguccaaccacagccccaccuccugcccgcccaucugccccggcuaccgcuggaugugccugcggcgcuucaucaucuuccuguucauccuccugcugugccucaucuuccugcugguccuccuggacuaccagggcaugcugcccgugugcccccucaucccggggagcaccaccacgaacaccggccccugcaagaccugcaccacgcccgcccaggggaacuccauguuccccagcugcugcugcaccaagccgaccgacggcaacugcacgugcauccccauccccuccagcugggccuucgccaaguaccugugggagugggcguccgugcgguucagcuggcugucccuccugguccccuucgugcagugguucguggggcugagcccgaccgucuggcucuccgccaucuggaugaugugguacuggggccccagccuguacagcaucgugucccccuucaucccccugcucccgaucuucuucugccuguggguguacaucugaggacuagucccuguucccagagcccacuuuuuuuucuuuuuuugaaauaaaauagccugucuuucagaucucaaaggcucuuuucagagccaccaaaaaaaaaaaaaaaaaaaaaaaaaaaaaaaaaaaaaaaaaaaaaaaaaaaaaaaaaaaaaaaaagaauu

SEQ ID NO: 9184 - RNA, 1903 nt, Artificial Sequence
  mRNA Design a-1 (hSL-A64-N5) comprising derived and/or modified sequence from Pf(3D7)__XP_001351122.1__HsALB_Pf-CSP(19-384)_L(SGG)_Ferritin (opt1)
aggagagucccgcagucggcguccagcggcucugcuuguucgugugugugucguugcaggccuuauucaagcuuaccaugaagugggugaccuucaucagccuccuguuccuguucuccagcgccuacucccuguuccaggaguaccagugcuacggcagcuccagcaacacccggguccucaacgagcugaacuacgacaacgccgggacgaaccuguacaacgagcucgagaugaacuacuacggcaagcaggagaacugguacucccugaagaagaacagccggucccugggggagaacgacgacggcaacaacgaggacaacgagaagcuccgcaagcccaagcacaagaagcugaagcagccggcggacgggaaccccgaccccaacgccaaccccaacguggacccgaacgccaaccccaacguggaccccaacgccaaccccaacgucgacccgaacgccaaccccaacgcgaaccccaacgccaaccccaacgccaacccgaacgccaaccccaacgcgaaccccaacgccaaccccaacgccaacccgaacgccaaccccaacgccaaccccaacgcgaaccccaacgccaacccgaacgccaaccccaacgccaaccccaacgccaaccccaacgcgaacccgaacgccaaccccaacguggaccccaacgccaaccccaacgccaacccgaacgccaaccccaacgcgaaccccaacgccaacccgaacgccaaccccaacgccaaccccaacgccaaccccaacgcgaacccgaacgccaaccccaacgccaaccccaacgccaaccccaacgcgaacccgaacgccaaccccaacgccaaccccaacgccaaccccaacgccaacccgaacgcgaaccccaacaagaacaaccagggcaacggccaggggcacaacaugcccaacgaccccaaccggaacguggacgagaacgccaacgccaacagcgccgucaagaacaacaacaacgaggagccguccgacaagcacaucaaggaguaccugaacaagauccagaacagccucuccaccgaguggagccccugcuccgugaccugcggcaacgggauccaggugcgcaucaagcccggcagcgccaacaagcccaaggacgagcuggacuacgcgaacgacaucgagaagaagaucugcaagauggagaagugcuccagcgucuucaacguggugaacuccagcagcgggggccuguccaaggacaucaucaagcuccugaacgagcaggucaacaaggagaugaacagcuccaaccuguacaugagcauguccagcuggugcuacacccacucccucgacggcgccgggcuguuccuguucgaccacgccgccgaggaguacgagcacgccaagaagcucaucaucuuccugaacgagaacaacgugccggugcagcugacgagcaucuccgcgcccgagcacaaguucgagggccucacccagaucuuccagaaggccuacgagcacgagcagcacaucagcgaguccaucaacaacaucgucgaccacgccaucaagagcaaggaccacgccaccuucaacuuccugcagugguacguggcggagcagcacgaggaggaggugcuguucaaggacauccucgacaagaucgagcugaucgggaacgagaaccacggccuguaccucgccgaccaguacgucaagggcaucgccaagucccgcaagagcugaggacuagucccuguucccagagcccacuuuuuuuucuuuuuuugaaauaaaauagccugucuuucagaucucaaaggcucuuuucagagccaccaaaaaaaaaaaaaaaaaaaaaaaaaaaaaaaaaaaaaaaaaaaaaaaaaaaaaaaaaaaaaaaaagaauu

SEQ ID NO: 9185 - RNA, 1864 nt, Artificial Sequence
  mRNA Design a-1 (hSL-A64-N5) comprising derived and/or modified sequence from Pf(3D7)__XP_001351122.1__HsALB_Pf-CSP(93-384)_L(PVTN)_HBsAg (opt1)
aggagagucccgcagucggcguccagcggcucugcuuguucgugugugugucguugcaggccuuauucaagcuuaccaugaagugggugaccuucaucagccuccuguuccuguucuccagcgccuacuccaagcugaagcagcccgccgacggcaacccggaccccaacgcgaaccccaacgucgaccccaacgccaacccgaacguggaccccaacgccaaccccaacguggaccccaacgccaacccgaacgccaaccccaacgcgaaccccaacgccaaccccaacgccaacccgaacgccaaccccaacgcgaaccccaacgccaaccccaacgccaacccgaacgccaaccccaacgccaaccccaacgcgaaccccaacgccaacccgaacgccaaccccaacgccaaccccaacgccaaccccaacgcgaacccgaacgucgaccccaacgccaaccccaacgccaaccccaacgccaacccgaacgccaaccccaacgcgaaccccaacgccaacccgaacgccaaccccaacgccaaccccaacgccaaccccaacgcgaacccgaacgccaaccccaacgccaaccccaacgccaaccccaacgcgaacccgaacgccaaccccaacgccaaccccaacgccaaccccaacgccaacccgaacaagaacaaccaggggaacggccaggggcacaacaugcccaacgaccccaaccgcaacguggacgagaacgcgaacgccaacagcgccgugaagaacaacaacaacgaggagcccuccgacaagcacaucaaggaguaccucaacaagauccagaacagccuguccaccgaguggagcccgugcuccgugaccugcggcaacgggauccagguccggaucaagcccggcagcgccaacaagcccaaggacgagcuggacuacgccaacgacaucgagaagaagaucugcaagauggagaagugcuccagcguguucaacgucgugaacuccagccccgugaccaacauggagaacaucaccuccggcuuccucgggccgcugcugguccuccaggcgggcuucuuccugcugacccgcauccucacgaucccccagagccuggacuccugguggaccagccugaacuuccucgggggcucccccgugugccuggggcagaacagccagagccccaccuccaaccacagcccgaccuccugcccgcccaucugccccggcuaccgguggaugugccugcgccgguucaucaucuuccucuucauccugcugcucugccugaucuuccugcucgugcugcuggacuaccagggcaugcuccccgucugcccccugauccccgggagcacgaccaccaacaccggcccgugcaagacgugcaccacccccgcccaggggaacuccauguuccccagcugcugcugcaccaagcccacggacggcaacugcacgugcaucccgauccccuccagcugggccuucgccaaguaccugugggagugggccuccgugcgcuucagcuggcucucccugcuggugcccuucguccagugguucgugggccucagccccaccguguggcuguccgcgaucuggaugaugugguacugggggccgagccuguacuccaucgucagccccuucaucccccuccugcccaucuucuucugccuguggguguacaucugaggacuagucccuguucccagagcccacuuuuuuuucuuuuuuugaaauaaaauagccugucuuucagaucucaaaggcucuuuucagagccaccaaaaaaaaaaaaaaaaaaaaaaaaaaaaaaaaaaaaaaaaaaaaaaaaaaaaaaaaaaaaaaaaagaauu

SEQ ID NO: 9186 - RNA, 1525 nt, Artificial Sequence; identical to SEQ ID NO: 6617
  mRNA Design a-1 (hSL-A64-N5) comprising derived and/or modified sequence from Pf(3D7)__XP_001351122.1__HsALB_Pf-CSP(199-377)_L(PVTN)_HBsAg (opt1)

SEQ ID NO: 9187 - RNA, 1222 nt, Artificial Sequence
  mRNA Design a-1 (hSL-A64-N5) comprising derived and/or modified sequence from Pf(3D7)__XP_001351122.1__HsALB_Pf-CSP(19-272)_L(AAY)_Pf-CSP(346-3 75)_L(AAY)_Pf-CSP(310-327) (opt1)
aggagagucccgcagucggcguccagcggcucugcuuguucgugugugugucguugcaggccuuauucaagcuuaccaugaagugggugaccuucaucagccuccuguuccuguucuccagcgccuacucccuguuccaggaguaccagugcuacggcagcuccagcaacacccgcguccucaacgagcugaacuacgacaacgccgggacgaaccuguacaacgagcucgagaugaacuacuacggcaagcaggagaacugguacucccugaagaagaacagccggucccugggggagaacgacgacggcaacaacgaggacaacgagaagcuccgcaagcccaagcacaagaagcugaagcagccggcggacgggaaccccgaccccaacgccaaccccaacguggacccgaacgccaaccccaacguggaccccaacgccaaccccaacgucgacccgaacgccaaccccaacgcgaaccccaacgccaaccccaacgccaacccgaacgccaaccccaacgcgaaccccaacgccaaccccaacgccaacccgaacgccaaccccaacgccaaccccaacgcgaaccccaacgccaacccgaacgccaaccccaacgccaaccccaacgccaaccccaacgcgaacccgaacgccaaccccaacguggaccccaacgccaaccccaacgccaacccgaacgccaaccccaacgcgaaccccaacgccaacccgaacgccaaccccaacgccaaccccaacgccaaccccaacgcgaacccgaacgccaaccccaacgccaaccccaacgccaaccccaacgcgaacccgaacgccaaccccaacgccaaccccaacgccaaccccaacgccaacccgaacgcgaaccccgccgccuacaucaagcccggcagcgccaacaagcccaaggacgagcuggacuacgccaacgacaucgagaagaagaucugcaagauggagaagugcuccgcggccuacgagccgagcgacaagcacaucaaggaguaccucaacaagauccagaacucccugugaggacuagucccuguucccagagcccacuuuuuuuucuuuuuuugaaauaaaauagccugucuuucagaucucaaaggcucuuuucagagccaccaaaaaaaaaaaaaaaaaaaaaaaaaaaaaaaaaaaaaaaaaaaaaaaaaaaaaaaaaaaaaaaaagaauu

SEQ ID NO: 9188 - RNA, 1270 nt, Artificial Sequence
  mRNA Design a-1 (hSL-A64-N5) comprising derived and/or modified sequence from Pf(3D7)__XP_001351122.1__HsALB_Pf-CSP(19-272)_L(AAY)_Pf-CSP(346-3 75)_L(AAY)_Pf-CSP(310-327)_L(AAY)_PADRE (opt1)
aggagagucccgcagucggcguccagcggcucugcuuguucgugugugugucguugcaggccuuauucaagcuuaccaugaagugggugaccuucaucagccuccuguuccuguucuccagcgccuacucccuguuccaggaguaccagugcuacggcagcuccagcaacacccgcguccucaacgagcugaacuacgacaacgccgggacgaaccuguacaacgagcucgagaugaacuacuacggcaagcaggagaacugguacucccugaagaagaacagccggucccugggggagaacgacgacggcaacaacgaggacaacgagaagcuccgcaagcccaagcacaagaagcugaagcagccggcggacgggaaccccgaccccaacgccaaccccaacguggacccgaacgccaaccccaacguggaccccaacgccaaccccaacgucgacccgaacgccaaccccaacgcgaaccccaacgccaaccccaacgccaacccgaacgccaaccccaacgcgaaccccaacgccaaccccaacgccaacccgaacgccaaccccaacgccaaccccaacgcgaaccccaacgccaacccgaacgccaaccccaacgccaaccccaacgccaaccccaacgcgaacccgaacgccaaccccaacguggaccccaacgccaaccccaacgccaacccgaacgccaaccccaacgcgaaccccaacgccaacccgaacgccaaccccaacgccaaccccaacgccaaccccaacgcgaacccgaacgccaaccccaacgccaaccccaacgccaaccccaacgcgaacccgaacgccaaccccaacgccaaccccaacgccaaccccaacgccaacccgaacgcgaaccccgccgccuacaucaagcccggcagcgccaacaagcccaaggacgagcuggacuacgccaacgacaucgagaagaagaucugcaagauggagaagugcuccgcggccuacgagccgagcgacaagcacaucaaggaguaccucaacaagauccagaacucccuggccgccuacgccaaguucguggcggccuggacccugaaggccgccgcgugaggacuagucccuguucccagagcccacuuuuuuuucuuuuuuugaaauaaaauagccugucuuucagaucucaaaggcucuuuucagagccaccaaaaaaaaaaaaaaaaaaaaaaaaaaaaaaaaaaaaaaaaaaaaaaaaaaaaaaaaaaaaaaaaagaauu

SEQ ID NO: 9189 - RNA, 1270 nt, Artificial Sequence
  mRNA Design a-1 (hSL-A64-N5) comprising derived and/or modified sequence from Pf(3D7)__XP_001351122.1__HsALB_Pf-CSP(19-272)_L(AAY)_Pf-CSP(310-3 27)_L(AAY)_Pf-CSP(346-375)_L(AAY)_PADRE (opt1)
aggagagucccgcagucggcguccagcggcucugcuuguucgugugugugucguugcaggccuuauucaagcuuaccaugaagugggugaccuucaucagccuccuguuccuguucuccagcgccuacucccuguuccaggaguaccagugcuacggcagcuccagcaacacccgcguccucaacgagcugaacuacgacaacgccgggacgaaccuguacaacgagcucgagaugaacuacuacggcaagcaggagaacugguacucccugaagaagaacagccggucccugggggagaacgacgacggcaacaacgaggacaacgagaagcuccgcaagcccaagcacaagaagcugaagcagccggcggacgggaaccccgaccccaacgccaaccccaacguggacccgaacgccaaccccaacguggaccccaacgccaaccccaacgucgacccgaacgccaaccccaacgcgaaccccaacgccaaccccaacgccaacccgaacgccaaccccaacgcgaaccccaacgccaaccccaacgccaacccgaacgccaaccccaacgccaaccccaacgcgaaccccaacgccaacccgaacgccaaccccaacgccaaccccaacgccaaccccaacgcgaacccgaacgccaaccccaacguggaccccaacgccaaccccaacgccaacccgaacgccaaccccaacgcgaaccccaacgccaacccgaacgccaaccccaacgccaaccccaacgccaaccccaacgcgaacccgaacgccaaccccaacgccaaccccaacgccaaccccaacgcgaacccgaacgccaaccccaacgccaaccccaacgccaaccccaacgccaacccgaacgcgaaccccgccgccuacgagcccagcgacaagcacaucaaggaguaccugaacaagauccagaacucccucgccgccuacaucaagcccggcagcgcgaacaagccgaaggacgagcuggacuacgccaacgacaucgagaagaagaucugcaagauggagaagugcuccgccgccuacgccaaguucguggcggccuggacccugaaggccgccgcgugaggacuagucccuguucccagagcccacuuuuuuuucuuuuuuugaaauaaaauagccugucuuucagaucucaaaggcucuuuucagagccaccaaaaaaaaaaaaaaaaaaaaaaaaaaaaaaaaaaaaaaaaaaaaaaaaaaaaaaaaaaaaaaaaagaauu

SEQ ID NO: 9190 - RNA, 1324 nt, Artificial Sequence
  mRNA Design a-1 (hSL-A64-N5) comprising derived and/or modified sequence from Pf(3D7)__XP_001351122.1__HsALB_Pf-CSP(19-272)_L(AAY)_Pf-CSP(310-3 27)_L(AAY)_Pf-CSP(346-375)_L(AAY)_PADRE_L(AAY)_P2 (opt1)
aggagagucccgcagucggcguccagcggcucugcuuguucgugugugugucguugcaggccuuauucaagcuuaccaugaagugggugaccuucaucagccuccuguuccuguucuccagcgccuacucccuguuccaggaguaccagugcuacggcagcuccagcaacacccgcguccucaacgagcugaacuacgacaacgccgggacgaaccuguacaacgagcucgagaugaacuacuacggcaagcaggagaacugguacucccugaagaagaacagccggucccugggggagaacgacgacggcaacaacgaggacaacgagaagcuccgcaagcccaagcacaagaagcugaagcagccggcggacgggaaccccgaccccaacgccaaccccaacguggacccgaacgccaaccccaacguggaccccaacgccaaccccaacgucgacccgaacgccaaccccaacgcgaaccccaacgccaaccccaacgccaacccgaacgccaaccccaacgcgaaccccaacgccaaccccaacgccaacccgaacgccaaccccaacgccaaccccaacgcgaaccccaacgccaacccgaacgccaaccccaacgccaaccccaacgccaaccccaacgcgaacccgaacgccaaccccaacguggaccccaacgccaaccccaacgccaacccgaacgccaaccccaacgcgaaccccaacgccaacccgaacgccaaccccaacgccaaccccaacgccaaccccaacgcgaacccgaacgccaaccccaacgccaaccccaacgccaaccccaacgcgaacccgaacgccaaccccaacgccaaccccaacgccaaccccaacgccaacccgaacgcgaaccccgccgccuacgagcccagcgacaagcacaucaaggaguaccugaacaagauccagaacucccucgccgccuacaucaagcccggcagcgcgaacaagccgaaggacgagcuggacuacgccaacgacaucgagaagaagaucugcaagauggagaagugcuccgccgccuacgccaaguucguggcggccuggacccugaaggccgccgcggccgccuaccaguacaucaaggccaacagcaaguucaucggcaucaccgagcucugaggacuagucccuguucccagagcccacuuuuuuuucuuuuuuugaaauaaaauagccugucuuucagaucucaaaggcucuuuucagagccaccaaaaaaaaaaaaaaaaaaaaaaaaaaaaaaaaaaaaaaaaaaaaaaaaaaaaaaaaaaaaaaaaagaauu

SEQ ID NO: 9191 - RNA, 1288 nt, Artificial Sequence
  mRNA Design a-1 (hSL-A64-N5) comprising derived and/or modified sequence from Pf(3D7)__XP_001351122.1__HsALB_Pf-CSP(19-272)_L(AAY)_Pf-CSP(310-3 27)_Linker (AAY)_Pf-CSP(346-397) (opt1)
aggagagucccgcagucggcguccagcggcucugcuuguucgugugugugucguugcaggccuuauucaagcuuaccaugaagugggugaccuucaucagccuccuguuccuguucuccagcgccuacucccuguuccaggaguaccagugcuacggcagcuccagcaacacccgcguccucaacgagcugaacuacgacaacgccgggacgaaccuguacaacgagcucgagaugaacuacuacggcaagcaggagaacugguacucccugaagaagaacagccggucccugggggagaacgacgacggcaacaacgaggacaacgagaagcuccgcaagcccaagcacaagaagcugaagcagccggcggacgggaaccccgaccccaacgccaaccccaacguggacccgaacgccaaccccaacguggaccccaacgccaaccccaacgucgacccgaacgccaaccccaacgcgaaccccaacgccaaccccaacgccaacccgaacgccaaccccaacgcgaaccccaacgccaaccccaacgccaacccgaacgccaaccccaacgccaaccccaacgcgaaccccaacgccaacccgaacgccaaccccaacgccaaccccaacgccaaccccaacgcgaacccgaacgccaaccccaacguggaccccaacgccaaccccaacgccaacccgaacgccaaccccaacgcgaaccccaacgccaacccgaacgccaaccccaacgccaaccccaacgccaaccccaacgcgaacccgaacgccaaccccaacgccaaccccaacgccaaccccaacgcgaacccgaacgccaaccccaacgccaaccccaacgccaaccccaacgccaacccgaacgcgaaccccgccgccuacgagcccagcgacaagcacaucaaggaguaccugaacaagauccagaacucccucgccgccuacaucaagcccggcagcgcgaacaagccgaaggacgagcuggacuacgccaacgacaucgagaagaagaucugcaagauggagaagugcuccagcguguucaacgucgugaacuccagcaucggccugaucauggugcucuccuuccuguuccugaacugaggacuagucccuguucccagagcccacuuuuuuuucuuuuuuugaaauaaaauagccugucuuucagaucucaaaggcucuuuucagagccaccaaaaaaaaaaaaaaaaaaaaaaaaaaaaaaaaaaaaaaaaaaaaaaaaaaaaaaaaaaaaaaaaagaauu

SEQ ID NO: 9192 - RNA, 1888 nt, Artificial Sequence
  mRNA Design a-1 (hSL-A64-N5) comprising derived and/or modified sequence from Pf(3D7)__XP_001351122.1__LumSynt_L(GGS4-GGG)_Pf-CSP(19-397) (opt2)
aggagagucccgcagucggcguccagcggcucugcuuguucgugugugugucguugcaggccuuauucaagcuuaccaugcagaucuacgagggcaagcucaccgccgagggccuccgcuucggcaucgucgccucccgcuucaaccacgcccucgucgaccgccucgucgagggcgccaucgacgccaucguccgccacggcggccgcgaggaggacaucacccucguccgcguccccggcuccugggagauccccgucgccgccggcgagcucgcccgcaaggaggacaucgacgccgucaucgccaucggcguccucauccgcggcgccaccccccacuucgacuacaucgccuccgaggucuccaagggccucgccgaccucucccucgagcuccgcaagcccaucaccuucggcgucaucaccgccgacacccucgagcaggccaucgagcgcgccggcaccaagcacggcaacaagggcugggaggccgcccucuccgccaucgagauggccaaccucuucaagucccuccgcggcggcuccggcggcuccggcggcuccggcggcuccggcggcggccucuuccaggaguaccagugcuacggcuccuccuccaacacccgcguccucaacgagcucaacuacgacaacgccggcaccaaccucuacaacgagcucgagaugaacuacuacggcaagcaggagaacugguacucccucaagaagaacucccgcucccucggcgagaacgacgacggcaacaacgaggacaacgagaagcuccgcaagcccaagcacaagaagcucaagcagcccgccgacggcaaccccgaccccaacgccaaccccaacgucgaccccaacgccaaccccaacgucgaccccaacgccaaccccaacgucgaccccaacgccaaccccaacgccaaccccaacgccaaccccaacgccaaccccaacgccaaccccaacgccaaccccaacgccaaccccaacgccaaccccaacgccaaccccaacgccaaccccaacgccaaccccaacgccaaccccaacgccaaccccaacgccaaccccaacgccaaccccaacgccaaccccaacgccaaccccaacgucgaccccaacgccaaccccaacgccaaccccaacgccaaccccaacgccaaccccaacgccaaccccaacgccaaccccaacgccaaccccaacgccaaccccaacgccaaccccaacgccaaccccaacgccaaccccaacgccaaccccaacgccaaccccaacgccaaccccaacgccaaccccaacgccaaccccaacgccaaccccaacgccaaccccaacaagaacaaccagggcaacggccagggccacaacaugcccaacgaccccaaccgcaacgucgacgagaacgccaacgccaacuccgccgucaagaacaacaacaacgaggagcccuccgacaagcacaucaaggaguaccucaacaagauccagaacucccucuccaccgaguggucccccugcuccgucaccugcggcaacggcauccagguccgcaucaagcccggcuccgccaacaagcccaaggacgagcucgacuacgccaacgacaucgagaagaagaucugcaagauggagaagugcuccuccgucuucaacgucgucaacuccuccaucggccucaucaugguccucuccuuccucuuccucaacugaggacuagucccuguucccagagcccacuuuuuuuucuuuuuuugaaauaaaauagccugucuuucagaucucaaaggcucuuuucagagccaccaaaaaaaaaaaaaaaaaaaaaaaaaaaaaaaaaaaaaaaaaaaaaaaaaaaaaaaaaaaaaaaaagaauu

SEQ ID NO: 9193 - RNA, 1750 nt, Artificial Sequence
  mRNA Design a-1 (hSL-A64-N5) comprising derived and/or modified sequence from Pf(3D7)__XP_001351122.1__HsALB_Pf-CSP(19-272)_L(PVTN)_HBsAg (opt2)
aggagagucccgcagucggcguccagcggcucugcuuguucgugugugugucguugcaggccuuauucaagcuuaccaugaagugggucaccuucaucucccuccucuuccucuucuccuccgccuacucccucuuccaggaguaccagugcuacggcuccuccuccaacacccgcguccucaacgagcucaacuacgacaacgccggcaccaaccucuacaacgagcucgagaugaacuacuacggcaagcaggagaacugguacucccucaagaagaacucccgcucccucggcgagaacgacgacggcaacaacgaggacaacgagaagcuccgcaagcccaagcacaagaagcucaagcagcccgccgacggcaaccccgaccccaacgccaaccccaacgucgaccccaacgccaaccccaacgucgaccccaacgccaaccccaacgucgaccccaacgccaaccccaacgccaaccccaacgccaaccccaacgccaaccccaacgccaaccccaacgccaaccccaacgccaaccccaacgccaaccccaacgccaaccccaacgccaaccccaacgccaaccccaacgccaaccccaacgccaaccccaacgccaaccccaacgccaaccccaacgccaaccccaacgccaaccccaacgucgaccccaacgccaaccccaacgccaaccccaacgccaaccccaacgccaaccccaacgccaaccccaacgccaaccccaacgccaaccccaacgccaaccccaacgccaaccccaacgccaaccccaacgccaaccccaacgccaaccccaacgccaaccccaacgccaaccccaacgccaaccccaacgccaaccccaacgccaaccccaacgccaacccccccgucaccaacauggagaacaucaccuccggcuuccucggcccccuccucguccuccaggccggcuucuuccuccucacccgcauccucaccaucccccagucccucgacuccugguggaccucccucaacuuccucggcggcucccccgucugccucggccagaacucccagucccccaccuccaaccacucccccaccuccugcccccccaucugccccggcuaccgcuggaugugccuccgccgcuucaucaucuuccucuucauccuccuccucugccucaucuuccuccucguccuccucgacuaccagggcaugcuccccgucugcccccucauccccggcuccaccaccaccaacaccggccccugcaagaccugcaccacccccgcccagggcaacuccauguuccccuccugcugcugcaccaagcccaccgacggcaacugcaccugcauccccauccccuccuccugggccuucgccaaguaccucugggagugggccuccguccgcuucuccuggcucucccuccucguccccuucguccagugguucgucggccucucccccaccgucuggcucuccgccaucuggaugaugugguacuggggccccucccucuacuccaucgucucccccuucaucccccuccuccccaucuucuucugccucugggucuacaucugaggacuagucccuguucccagagcccacuuuuuuuucuuuuuuugaaauaaaauagccugucuuucagaucucaaaggcucuuuucagagccaccaaaaaaaaaaaaaaaaaaaaaaaaaaaaaaaaaaaaaaaaaaaaaaaaaaaaaaaaaaaaaaaaagaauu

SEQ ID NO: 9194 - RNA, 1867 nt, Artificial Sequence
  mRNA Design a-1 (hSL-A64-N5) comprising derived and/or modified sequence from Pf(3D7)__XP_001351122.1__HsALB_Pf-CSP(19-272)_L(AAY)_Pf-CSP(346-3 65)_L(AAY)_PADRE_L(PVTN)_HBsAg (opt2)
aggagagucccgcagucggcguccagcggcucugcuuguucgugugugugucguugcaggccuuauucaagcuuaccaugaagugggucaccuucaucucccuccucuuccucuucuccuccgccuacucccucuuccaggaguaccagugcuacggcuccuccuccaacacccgcguccucaacgagcucaacuacgacaacgccggcaccaaccucuacaacgagcucgagaugaacuacuacggcaagcaggagaacugguacucccucaagaagaacucccgcucccucggcgagaacgacgacggcaacaacgaggacaacgagaagcuccgcaagcccaagcacaagaagcucaagcagcccgccgacggcaaccccgaccccaacgccaaccccaacgucgaccccaacgccaaccccaacgucgaccccaacgccaaccccaacgucgaccccaacgccaaccccaacgccaaccccaacgccaaccccaacgccaaccccaacgccaaccccaacgccaaccccaacgccaaccccaacgccaaccccaacgccaaccccaacgccaaccccaacgccaaccccaacgccaaccccaacgccaaccccaacgccaaccccaacgccaaccccaacgccaaccccaacgccaaccccaacgucgaccccaacgccaaccccaacgccaaccccaacgccaaccccaacgccaaccccaacgccaaccccaacgccaaccccaacgccaaccccaacgccaaccccaacgccaaccccaacgccaaccccaacgccaaccccaacgccaaccccaacgccaaccccaacgccaaccccaacgccaaccccaacgccaaccccaacgccaaccccaacgccaaccccgccgccuacaucaagcccggcuccgccaacaagcccaaggacgagcucgacuacgccaacgacaucgaggccgccuacgccaaguucgucgccgccuggacccucaaggccgccgcccccgucaccaacauggagaacaucaccuccggcuuccucggcccccuccucguccuccaggccggcuucuuccuccucacccgcauccucaccaucccccagucccucgacuccugguggaccucccucaacuuccucggcggcucccccgucugccucggccagaacucccagucccccaccuccaaccacucccccaccuccugcccccccaucugccccggcuaccgcuggaugugccuccgccgcuucaucaucuuccucuucauccuccuccucugccucaucuuccuccucguccuccucgacuaccagggcaugcuccccgucugcccccucauccccggcuccaccaccaccaacaccggccccugcaagaccugcaccacccccgcccagggcaacuccauguuccccuccugcugcugcaccaagcccaccgacggcaacugcaccugcauccccauccccuccuccugggccuucgccaaguaccucugggagugggccuccguccgcuucuccuggcucucccuccucguccccuucguccagugguucgucggccucucccccaccgucuggcucuccgccaucuggaugaugugguacuggggccccucccucuacuccaucgucucccccuucaucccccuccuccccaucuucuucugccucugggucuacaucugaggacuagucccuguucccagagcccacuuuuuuuucuuuuuuugaaauaaaauagccugucuuucagaucucaaaggcucuuuucagagccaccaaaaaaaaaaaaaaaaaaaaaaaaaaaaaaaaaaaaaaaaaaaaaaaaaaaaaaaaaaaaaaaaagaauu

SEQ ID NO: 9195 - RNA, 2086 nt, Artificial Sequence
  mRNA Design a-1 (hSL-A64-N5) comprising derived and/or modified sequence from Pf(3D7)__XP_001351122.1__HsALB_Pf-CSP(19-384)_L(PVTN)_HBsAg (opt2)
aggagagucccgcagucggcguccagcggcucugcuuguucgugugugugucguugcaggccuuauucaagcuuaccaugaagugggucaccuucaucucccuccucuuccucuucuccuccgccuacucccucuuccaggaguaccagugcuacggcuccuccuccaacacccgcguccucaacgagcucaacuacgacaacgccggcaccaaccucuacaacgagcucgagaugaacuacuacggcaagcaggagaacugguacucccucaagaagaacucccgcucccucggcgagaacgacgacggcaacaacgaggacaacgagaagcuccgcaagcccaagcacaagaagcucaagcagcccgccgacggcaaccccgaccccaacgccaaccccaacgucgaccccaacgccaaccccaacgucgaccccaacgccaaccccaacgucgaccccaacgccaaccccaacgccaaccccaacgccaaccccaacgccaaccccaacgccaaccccaacgccaaccccaacgccaaccccaacgccaaccccaacgccaaccccaacgccaaccccaacgccaaccccaacgccaaccccaacgccaaccccaacgccaaccccaacgccaaccccaacgccaaccccaacgccaaccccaacgucgaccccaacgccaaccccaacgccaaccccaacgccaaccccaacgccaaccccaacgccaaccccaacgccaaccccaacgccaaccccaacgccaaccccaacgccaaccccaacgccaaccccaacgccaaccccaacgccaaccccaacgccaaccccaacgccaaccccaacgccaaccccaacgccaaccccaacgccaaccccaacgccaaccccaacaagaacaaccagggcaacggccagggccacaacaugcccaacgaccccaaccgcaacgucgacgagaacgccaacgccaacuccgccgucaagaacaacaacaacgaggagcccuccgacaagcacaucaaggaguaccucaacaagauccagaacucccucuccaccgaguggucccccugcuccgucaccugcggcaacggcauccagguccgcaucaagcccggcuccgccaacaagcccaaggacgagcucgacuacgccaacgacaucgagaagaagaucugcaagauggagaagugcuccuccgucuucaacgucgucaacuccucccccgucaccaacauggagaacaucaccuccggcuuccucggcccccuccucguccuccaggccggcuucuuccuccucacccgcauccucaccaucccccagucccucgacuccugguggaccucccucaacuuccucggcggcucccccgucugccucggccagaacucccagucccccaccuccaaccacucccccaccuccugcccccccaucugccccggcuaccgcuggaugugccuccgccgcuucaucaucuuccucuucauccuccuccucugccucaucuuccuccucguccuccucgacuaccagggcaugcuccccgucugcccccucauccccggcuccaccaccaccaacaccggccccugcaagaccugcaccacccccgcccagggcaacuccauguuccccuccugcugcugcaccaagcccaccgacggcaacugcaccugcauccccauccccuccuccugggccuucgccaaguaccucugggagugggccuccguccgcuucuccuggcucucccuccucguccccuucguccagugguucgucggccucucccccaccgucuggcucuccgccaucuggaugaugugguacuggggccccucccucuacuccaucgucucccccuucaucccccuccuccccaucuucuucugccucugggucuacaucugaggacuagucccuguucccagagcccacuuuuuuuucuuuuuuugaaauaaaauagccugucuuucagaucucaaaggcucuuuucagagccaccaaaaaaaaaaaaaaaaaaaaaaaaaaaaaaaaaaaaaaaaaaaaaaaaaaaaaaaaaaaaaaaaagaauu

SEQ ID NO: 9196 - RNA, 1903 nt, Artificial Sequence
  mRNA Design a-1 (hSL-A64-N5) comprising derived and/or modified sequence from Pf(3D7)__XP_001351122.1__HsALB_Pf-CSP(19-384)_L(SGG)_Ferritin (opt2)
aggagagucccgcagucggcguccagcggcucugcuuguucgugugugugucguugcaggccuuauucaagcuuaccaugaagugggucaccuucaucucccuccucuuccucuucuccuccgccuacucccucuuccaggaguaccagugcuacggcuccuccuccaacacccgcguccucaacgagcucaacuacgacaacgccggcaccaaccucuacaacgagcucgagaugaacuacuacggcaagcaggagaacugguacucccucaagaagaacucccgcucccucggcgagaacgacgacggcaacaacgaggacaacgagaagcuccgcaagcccaagcacaagaagcucaagcagcccgccgacggcaaccccgaccccaacgccaaccccaacgucgaccccaacgccaaccccaacgucgaccccaacgccaaccccaacgucgaccccaacgccaaccccaacgccaaccccaacgccaaccccaacgccaaccccaacgccaaccccaacgccaaccccaacgccaaccccaacgccaaccccaacgccaaccccaacgccaaccccaacgccaaccccaacgccaaccccaacgccaaccccaacgccaaccccaacgccaaccccaacgccaaccccaacgccaaccccaacgucgaccccaacgccaaccccaacgccaaccccaacgccaaccccaacgccaaccccaacgccaaccccaacgccaaccccaacgccaaccccaacgccaaccccaacgccaaccccaacgccaaccccaacgccaaccccaacgccaaccccaacgccaaccccaacgccaaccccaacgccaaccccaacgccaaccccaacgccaaccccaacgccaaccccaacaagaacaaccagggcaacggccagggccacaacaugcccaacgaccccaaccgcaacgucgacgagaacgccaacgccaacuccgccgucaagaacaacaacaacgaggagcccuccgacaagcacaucaaggaguaccucaacaagauccagaacucccucuccaccgaguggucccccugcuccgucaccugcggcaacggcauccagguccgcaucaagcccggcuccgccaacaagcccaaggacgagcucgacuacgccaacgacaucgagaagaagaucugcaagauggagaagugcuccuccgucuucaacgucgucaacuccuccuccggcggccucuccaaggacaucaucaagcuccucaacgagcaggucaacaaggagaugaacuccuccaaccucuacauguccauguccuccuggugcuacacccacucccucgacggcgccggccucuuccucuucgaccacgccgccgaggaguacgagcacgccaagaagcucaucaucuuccucaacgagaacaacguccccguccagcucaccuccaucuccgcccccgagcacaaguucgagggccucacccagaucuuccagaaggccuacgagcacgagcagcacaucuccgaguccaucaacaacaucgucgaccacgccaucaaguccaaggaccacgccaccuucaacuuccuccagugguacgucgccgagcagcacgaggaggagguccucuucaaggacauccucgacaagaucgagcucaucggcaacgagaaccacggccucuaccucgccgaccaguacgucaagggcaucgccaagucccgcaaguccugaggacuagucccuguucccagagcccacuuuuuuuucuuuuuuugaaauaaaauagccugucuuucagaucucaaaggcucuuuucagagccaccaaaaaaaaaaaaaaaaaaaaaaaaaaaaaaaaaaaaaaaaaaaaaaaaaaaaaaaaaaaaaaaaagaauu

SEQ ID NO: 9197 - RNA, 1864 nt, Artificial Sequence
  mRNA Design a-1 (hSL-A64-N5) comprising derived and/or modified sequence from Pf(3D7)__XP_001351122.1__HsALB_Pf-CSP(93-384)_L(PVTN)_HBsAg (opt2)
aggagagucccgcagucggcguccagcggcucugcuuguucgugugugugucguugcaggccuuauucaagcuuaccaugaagugggucaccuucaucucccuccucuuccucuucuccuccgccuacuccaagcucaagcagcccgccgacggcaaccccgaccccaacgccaaccccaacgucgaccccaacgccaaccccaacgucgaccccaacgccaaccccaacgucgaccccaacgccaaccccaacgccaaccccaacgccaaccccaacgccaaccccaacgccaaccccaacgccaaccccaacgccaaccccaacgccaaccccaacgccaaccccaacgccaaccccaacgccaaccccaacgccaaccccaacgccaaccccaacgccaaccccaacgccaaccccaacgccaaccccaacgccaaccccaacgucgaccccaacgccaaccccaacgccaaccccaacgccaaccccaacgccaaccccaacgccaaccccaacgccaaccccaacgccaaccccaacgccaaccccaacgccaaccccaacgccaaccccaacgccaaccccaacgccaaccccaacgccaaccccaacgccaaccccaacgccaaccccaacgccaaccccaacgccaaccccaacgccaaccccaacaagaacaaccagggcaacggccagggccacaacaugcccaacgaccccaaccgcaacgucgacgagaacgccaacgccaacuccgccgucaagaacaacaacaacgaggagcccuccgacaagcacaucaaggaguaccucaacaagauccagaacucccucuccaccgaguggucccccugcuccgucaccugcggcaacggcauccagguccgcaucaagcccggcuccgccaacaagcccaaggacgagcucgacuacgccaacgacaucgagaagaagaucugcaagauggagaagugcuccuccgucuucaacgucgucaacuccucccccgucaccaacauggagaacaucaccuccggcuuccucggcccccuccucguccuccaggccggcuucuuccuccucacccgcauccucaccaucccccagucccucgacuccugguggaccucccucaacuuccucggcggcucccccgucugccucggccagaacucccagucccccaccuccaaccacucccccaccuccugcccccccaucugccccggcuaccgcuggaugugccuccgccgcuucaucaucuuccucuucauccuccuccucugccucaucuuccuccucguccuccucgacuaccagggcaugcuccccgucugcccccucauccccggcuccaccaccaccaacaccggccccugcaagaccugcaccacccccgcccagggcaacuccauguuccccuccugcugcugcaccaagcccaccgacggcaacugcaccugcauccccauccccuccuccugggccuucgccaaguaccucugggagugggccuccguccgcuucuccuggcucucccuccucguccccuucguccagugguucgucggccucucccccaccgucuggcucuccgccaucuggaugaugugguacuggggccccucccucuacuccaucgucucccccuucaucccccuccuccccaucuucuucugccucugggucuacaucugaggacuagucccuguucccagagcccacuuuuuuuucuuuuuuugaaauaaaauagccugucuuucagaucucaaaggcucuuuucagagccaccaaaaaaaaaaaaaaaaaaaaaaaaaaaaaaaaaaaaaaaaaaaaaaaaaaaaaaaaaaaaaaaaagaauu

SEQ ID NO: 9198 - RNA, 1525 nt, Artificial Sequence; identical to SEQ ID NO: 6647
  mRNA Design a-1 (hSL-A64-N5) comprising derived and/or modified sequence from Pf(3D7)__XP_001351122.1__HsALB_Pf-CSP(199-377)_L(PVTN)_HBsAg (opt2)

SEQ ID NO: 9199 - RNA, 1222 nt, Artificial Sequence
  mRNA Design a-1 (hSL-A64-N5) comprising derived and/or modified sequence from Pf(3D7)__XP_001351122.1__HsALB_Pf-CSP(19-272)_L(AAY)_Pf-CSP(346-3 75)_L(AAY)_Pf-CSP(310-327) (opt2)
aggagagucccgcagucggcguccagcggcucugcuuguucgugugugugucguugcaggccuuauucaagcuuaccaugaagugggucaccuucaucucccuccucuuccucuucuccuccgccuacucccucuuccaggaguaccagugcuacggcuccuccuccaacacccgcguccucaacgagcucaacuacgacaacgccggcaccaaccucuacaacgagcucgagaugaacuacuacggcaagcaggagaacugguacucccucaagaagaacucccgcucccucggcgagaacgacgacggcaacaacgaggacaacgagaagcuccgcaagcccaagcacaagaagcucaagcagcccgccgacggcaaccccgaccccaacgccaaccccaacgucgaccccaacgccaaccccaacgucgaccccaacgccaaccccaacgucgaccccaacgccaaccccaacgccaaccccaacgccaaccccaacgccaaccccaacgccaaccccaacgccaaccccaacgccaaccccaacgccaaccccaacgccaaccccaacgccaaccccaacgccaaccccaacgccaaccccaacgccaaccccaacgccaaccccaacgccaaccccaacgccaaccccaacgccaaccccaacgucgaccccaacgccaaccccaacgccaaccccaacgccaaccccaacgccaaccccaacgccaaccccaacgccaaccccaacgccaaccccaacgccaaccccaacgccaaccccaacgccaaccccaacgccaaccccaacgccaaccccaacgccaaccccaacgccaaccccaacgccaaccccaacgccaaccccaacgccaaccccaacgccaaccccgccgccuacaucaagcccggcuccgccaacaagcccaaggacgagcucgacuacgccaacgacaucgagaagaagaucugcaagauggagaagugcuccgccgccuacgagcccuccgacaagcacaucaaggaguaccucaacaagauccagaacucccucugaggacuagucccuguucccagagcccacuuuuuuuucuuuuuuugaaauaaaauagccugucuuucagaucucaaaggcucuuuucagagccaccaaaaaaaaaaaaaaaaaaaaaaaaaaaaaaaaaaaaaaaaaaaaaaaaaaaaaaaaaaaaaaaaagaauu

SEQ ID NO: 9200 - RNA, 1270 nt, Artificial Sequence
  mRNA Design a-1 (hSL-A64-N5) comprising derived and/or modified sequence from Pf(3D7)__XP_001351122.1__HsALB_Pf-CSP(19-272)_L(AAY)_Pf-CSP(346-3 75)_L(AAY)_Pf-CSP(310-327)_L(AAY)_PADRE (opt2)
aggagagucccgcagucggcguccagcggcucugcuuguucgugugugugucguugcaggccuuauucaagcuuaccaugaagugggucaccuucaucucccuccucuuccucuucuccuccgccuacucccucuuccaggaguaccagugcuacggcuccuccuccaacacccgcguccucaacgagcucaacuacgacaacgccggcaccaaccucuacaacgagcucgagaugaacuacuacggcaagcaggagaacugguacucccucaagaagaacucccgcucccucggcgagaacgacgacggcaacaacgaggacaacgagaagcuccgcaagcccaagcacaagaagcucaagcagcccgccgacggcaaccccgaccccaacgccaaccccaacgucgaccccaacgccaaccccaacgucgaccccaacgccaaccccaacgucgaccccaacgccaaccccaacgccaaccccaacgccaaccccaacgccaaccccaacgccaaccccaacgccaaccccaacgccaaccccaacgccaaccccaacgccaaccccaacgccaaccccaacgccaaccccaacgccaaccccaacgccaaccccaacgccaaccccaacgccaaccccaacgccaaccccaacgccaaccccaacgucgaccccaacgccaaccccaacgccaaccccaacgccaaccccaacgccaaccccaacgccaaccccaacgccaaccccaacgccaaccccaacgccaaccccaacgccaaccccaacgccaaccccaacgccaaccccaacgccaaccccaacgccaaccccaacgccaaccccaacgccaaccccaacgccaaccccaacgccaaccccaacgccaaccccgccgccuacaucaagcccggcuccgccaacaagcccaaggacgagcucgacuacgccaacgacaucgagaagaagaucugcaagauggagaagugcuccgccgccuacgagcccuccgacaagcacaucaaggaguaccucaacaagauccagaacucccucgccgccuacgccaaguucgucgccgccuggacccucaaggccgccgccugaggacuagucccuguucccagagcccacuuuuuuuucuuuuuuugaaauaaaauagccugucuuucagaucucaaaggcucuuuucagagccaccaaaaaaaaaaaaaaaaaaaaaaaaaaaaaaaaaaaaaaaaaaaaaaaaaaaaaaaaaaaaaaaaagaauu

SEQ ID NO: 9201 - RNA, 1270 nt, Artificial Sequence
  mRNA Design a-1 (hSL-A64-N5) comprising derived and/or modified sequence from Pf(3D7)__XP_001351122.1__HsALB_Pf-CSP(19-272)_L(AAY)_Pf-CSP(310-3 27)_L(AAY)_Pf-CSP(346-375)_L(AAY)_PADRE (opt2)
aggagagucccgcagucggcguccagcggcucugcuuguucgugugugugucguugcaggccuuauucaagcuuaccaugaagugggucaccuucaucucccuccucuuccucuucuccuccgccuacucccucuuccaggaguaccagugcuacggcuccuccuccaacacccgcguccucaacgagcucaacuacgacaacgccggcaccaaccucuacaacgagcucgagaugaacuacuacggcaagcaggagaacugguacucccucaagaagaacucccgcucccucggcgagaacgacgacggcaacaacgaggacaacgagaagcuccgcaagcccaagcacaagaagcucaagcagcccgccgacggcaaccccgaccccaacgccaaccccaacgucgaccccaacgccaaccccaacgucgaccccaacgccaaccccaacgucgaccccaacgccaaccccaacgccaaccccaacgccaaccccaacgccaaccccaacgccaaccccaacgccaaccccaacgccaaccccaacgccaaccccaacgccaaccccaacgccaaccccaacgccaaccccaacgccaaccccaacgccaaccccaacgccaaccccaacgccaaccccaacgccaaccccaacgccaaccccaacgucgaccccaacgccaaccccaacgccaaccccaacgccaaccccaacgccaaccccaacgccaaccccaacgccaaccccaacgccaaccccaacgccaaccccaacgccaaccccaacgccaaccccaacgccaaccccaacgccaaccccaacgccaaccccaacgccaaccccaacgccaaccccaacgccaaccccaacgccaaccccaacgccaaccccgccgccuacgagcccuccgacaagcacaucaaggaguaccucaacaagauccagaacucccucgccgccuacaucaagcccggcuccgccaacaagcccaaggacgagcucgacuacgccaacgacaucgagaagaagaucugcaagauggagaagugcuccgccgccuacgccaaguucgucgccgccuggacccucaaggccgccgccugaggacuagucccuguucccagagcccacuuuuuuuucuuuuuuugaaauaaaauagccugucuuucagaucucaaaggcucuuuucagagccaccaaaaaaaaaaaaaaaaaaaaaaaaaaaaaaaaaaaaaaaaaaaaaaaaaaaaaaaaaaaaaaaaagaauu

SEQ ID NO: 9202 - RNA, 1324 nt, Artificial Sequence
  mRNA Design a-1 (hSL-A64-N5) comprising derived and/or modified sequence from Pf(3D7)__XP_001351122.1__HsALB_Pf-CSP(19-272)_L(AAY)_Pf-CSP(310-3 27)_L(AAY)_Pf-CSP(346-375)_L(AAY)_PADRE_L(AAY)_P2 (opt2)
aggagagucccgcagucggcguccagcggcucugcuuguucgugugugugucguugcaggccuuauucaagcuuaccaugaagugggucaccuucaucucccuccucuuccucuucuccuccgccuacucccucuuccaggaguaccagugcuacggcuccuccuccaacacccgcguccucaacgagcucaacuacgacaacgccggcaccaaccucuacaacgagcucgagaugaacuacuacggcaagcaggagaacugguacucccucaagaagaacucccgcucccucggcgagaacgacgacggcaacaacgaggacaacgagaagcuccgcaagcccaagcacaagaagcucaagcagcccgccgacggcaaccccgaccccaacgccaaccccaacgucgaccccaacgccaaccccaacgucgaccccaacgccaaccccaacgucgaccccaacgccaaccccaacgccaaccccaacgccaaccccaacgccaaccccaacgccaaccccaacgccaaccccaacgccaaccccaacgccaaccccaacgccaaccccaacgccaaccccaacgccaaccccaacgccaaccccaacgccaaccccaacgccaaccccaacgccaaccccaacgccaaccccaacgccaaccccaacgucgaccccaacgccaaccccaacgccaaccccaacgccaaccccaacgccaaccccaacgccaaccccaacgccaaccccaacgccaaccccaacgccaaccccaacgccaaccccaacgccaaccccaacgccaaccccaacgccaaccccaacgccaaccccaacgccaaccccaacgccaaccccaacgccaaccccaacgccaaccccaacgccaaccccgccgccuacgagcccuccgacaagcacaucaaggaguaccucaacaagauccagaacucccucgccgccuacaucaagcccggcuccgccaacaagcccaaggacgagcucgacuacgccaacgacaucgagaagaagaucugcaagauggagaagugcuccgccgccuacgccaaguucgucgccgccuggacccucaaggccgccgccgccgccuaccaguacaucaaggccaacuccaaguucaucggcaucaccgagcucugaggacuagucccuguucccagagcccacuuuuuuuucuuuuuuugaaauaaaauagccugucuuucagaucucaaaggcucuuuucagagccaccaaaaaaaaaaaaaaaaaaaaaaaaaaaaaaaaaaaaaaaaaaaaaaaaaaaaaaaaaaaaaaaaagaauu

SEQ ID NO: 9203 - RNA, 1288 nt, Artificial Sequence
  mRNA Design a-1 (hSL-A64-N5) comprising derived and/or modified sequence from Pf(3D7)__XP_001351122.1__HsALB_Pf-CSP(19-272)_L(AAY)_Pf-CSP(310-3 27)_Linker (AAY)_Pf-CSP(346-397) (opt2)
aggagagucccgcagucggcguccagcggcucugcuuguucgugugugugucguugcaggccuuauucaagcuuaccaugaagugggucaccuucaucucccuccucuuccucuucuccuccgccuacucccucuuccaggaguaccagugcuacggcuccuccuccaacacccgcguccucaacgagcucaacuacgacaacgccggcaccaaccucuacaacgagcucgagaugaacuacuacggcaagcaggagaacugguacucccucaagaagaacucccgcucccucggcgagaacgacgacggcaacaacgaggacaacgagaagcuccgcaagcccaagcacaagaagcucaagcagcccgccgacggcaaccccgaccccaacgccaaccccaacgucgaccccaacgccaaccccaacgucgaccccaacgccaaccccaacgucgaccccaacgccaaccccaacgccaaccccaacgccaaccccaacgccaaccccaacgccaaccccaacgccaaccccaacgccaaccccaacgccaaccccaacgccaaccccaacgccaaccccaacgccaaccccaacgccaaccccaacgccaaccccaacgccaaccccaacgccaaccccaacgccaaccccaacgccaaccccaacgucgaccccaacgccaaccccaacgccaaccccaacgccaaccccaacgccaaccccaacgccaaccccaacgccaaccccaacgccaaccccaacgccaaccccaacgccaaccccaacgccaaccccaacgccaaccccaacgccaaccccaacgccaaccccaacgccaaccccaacgccaaccccaacgccaaccccaacgccaaccccaacgccaaccccgccgccuacgagcccuccgacaagcacaucaaggaguaccucaacaagauccagaacucccucgccgccuacaucaagcccggcuccgccaacaagcccaaggacgagcucgacuacgccaacgacaucgagaagaagaucugcaagauggagaagugcuccuccgucuucaacgucgucaacuccuccaucggccucaucaugguccucuccuuccucuuccucaacugaggacuagucccuguucccagagcccacuuuuuuuucuuuuuuugaaauaaaauagccugucuuucagaucucaaaggcucuuuucagagccaccaaaaaaaaaaaaaaaaaaaaaaaaaaaaaaaaaaaaaaaaaaaaaaaaaaaaaaaaaaaaaaaaagaauu

SEQ ID NO: 9204 - RNA, 1888 nt, Artificial Sequence
  mRNA Design a-1 (hSL-A64-N5) comprising derived and/or modified sequence from Pf(3D7)__XP_001351122.1__LumSynt_L(GGS4-GGG)_Pf-CSP(19-397) (opt3)
aggagagucccgcagucggcguccagcggcucugcuuguucgugugugugucguugcaggccuuauucaagcuuaccaugcagaucuacgagggcaagcugaccgccgaagggcucagauucggaauuguggcuagcagguuuaaccacgcacuugucgaccggcugguugagggugccauagaugcgaucgugcgccauggcgggcgagaagaggacauuacauugguacgugugcccggauccugggaaaucccugucgcugccggcgaguuagcaagaaaagaggauauugacgccgugaucgcuauagguguucugaucaggggagcaacuccacacuucgauuauauugccucugaagugucaaaggggcuagcugaccucagucuggagcuucggaaaccgaucacguuuggcgucauuaccgccgauacacuggaacaagcgaucgagcgcgcaggcacuaagcaugggaauaaaggaugggaggccgcuuugagcgccauagaaauggcaaaccucuucaagucccugagagguggcucugggggaucgggcgguucagggggaagcggcggcgggcuguuucaggaguaccagugcuauggaaguuccucuaauaccagggugcucaacgaauuaaauuacgacaacgcugguacaaaucuguauaacgagcuugaaaugaauuacuauggcaagcaggagaacugguacagcuugaaaaagaacucccggucacugggggagaaugaugacggaaauaacgaagauaaugagaaacuacgcaagcccaaacacaagaagcucaaacaaccugccgacggcaacccagaucccaacgcgaauccuaacguagacccaaaugccaaccccaauguugacccuaacgcaaauccaaacguggauccgaaugcuaaccccaaugccaacccuaaugcuaacccaaaugccaaccccaacgcaaauccuaacgccaauccaaacgcuaaucccaacgcgaauccgaacgcaaauccuaacgccaaucccaacgcuaauccaaacgccaauccuaacgcaaaccccaaugccaacccaaaugcuaaccccaaugccaacccuaaugcaaacccaaaugucgacccgaacgcgaaucccaacgcuaauccuaacgccaauccaaacgcaaaccccaaugccaacccuaaugcuaacccaaaugccaaccccaaugcaaacccgaaugcuaacccuaaugccaacccaaaugcgaaccccaaugccaacccuaaugcuaaccccaacgcaaauccaaacgccaauccuaacgcuaaucccaacgccaauccaaacgcaaauccgaacaagaauaaccaggguaaugggcagggccauaacaugccuaaugaucccaaccgaaacguggacgaaaaugcgaacgccaauagugcugugaaaaacaauaacaaugaggaaccaagcgauaagcacauuaaagaguaccugaacaagauccaaaauucucuuuccaccgaguggucacccugcagcgucacuugcggaaacggcauucagguuagaaucaaaccugggagugccaauaagccaaaggacgaacuggauuaugcaaacgacaucgagaaaaagauuuguaaaauggaaaaguguucuuccguguucaauguagugaacagcucgauaggauugaucaugguccucucuuuucuguucuuaaauugaggacuagucccuguucccagagcccacuuuuuuuucuuuuuuugaaauaaaauagccugucuuucagaucucaaaggcucuuuucagagccaccaaaaaaaaaaaaaaaaaaaaaaaaaaaaaaaaaaaaaaaaaaaaaaaaaaaaaaaaaaaaaaaaagaauu

SEQ ID NO: 9205 - RNA, 1750 nt, Artificial Sequence
  mRNA Design a-1 (hSL-A64-N5) comprising derived and/or modified sequence from Pf(3D7)__XP_001351122.1__HsALB_Pf-CSP(19-272)_L(PVTN)_HBsAg (opt3)
aggagagucccgcagucggcguccagcggcucugcuuguucgugugugugucguugcaggccuuauucaagcuuaccaugaagugggugaccuucaucagccugcucuuucuuuucuccucugccuacucacuguuucaggaguaucaaugcuacggcaguagcuccaacacaagagucuugaaugaauuaaacuaugacaaugcugggacuaaccuguacaaugagcuagaaaugaacuauuacggaaaacaggagaauugguauucucucaagaaaaacucgaggucacugggugaaaaugaugacggcaacaaugaggauaacgagaaacuucggaagcccaagcacaagaaacugaagcagccugcagacgggaauccagauccgaacgccaaucccaacguugacccuaacgcgaauccaaacguggaucccaaugcuaacccuaauguagacccaaacgccaaucccaacgcaaauccuaacgccaauccaaacgcuaauccgaacgcaaaucccaacgccaacccuaaugcuaacccaaaugccaaccccaaugcgaacccuaaugcaaacccaaaugccaaccccaaugcuaacccgaaugccaacccuaaugcaaaccccaacgcuaauccaaacgccaauccuaacgcgaaucccaacguggauccaaaugccaaccccaaugcaaacccuaaugcuaacccaaaugccaacccgaaugcuaaccccaacgccaauccuaacgcaaauccaaacgccaaucccaacgcuaauccuaacgcgaauccaaacgcaaaucccaacgccaauccgaacgcuaauccuaacgccaauccaaacgcaaaccccaaugccaacccuaaugcuaaccccaaugccaacccaccugucacgaauauggaaaacauuaccagcggauucuugggcccccuccuggugcugcaggcaggguuuuuccucuuaacacgcauacugacuaucccacaaagucuugacuccugguggaccucuuugaauuuucuggguggaagcccgguuugucuaggccagaacucccagucaccuacaaguaaucauagccccaccucuugcccacccauuuguccuggcuaccgauggaugugccuccguagauucaucauuuuucuguucauccuucuguugugucucauauuucuguuagugcugcucgauuaccaggggaugcuuccagucugcccccugaucccuggauccacuacaaccaacacggguccguguaaaacuugcaccacaccagcgcaaggcaauucaauguuccccagcuguugcuguacuaagccuaccgacgggaacugcacaugcauuccaauccccaguucuugggcuuuugccaaauauuugugggagugggcauccgugagguucagcuggcuaucgcugcucguaccuuucguucagugguuugugggacugucuccgaccgucuggcuuuccgccauuuggaugaugugguacuggggccccucacuguauaguaucgugagcccauucauaccuuugcuccccaucuuuuucugucuguggguguacauuugaggacuagucccuguucccagagcccacuuuuuuuucuuuuuuugaaauaaaauagccugucuuucagaucucaaaggcucuuuucagagccaccaaaaaaaaaaaaaaaaaaaaaaaaaaaaaaaaaaaaaaaaaaaaaaaaaaaaaaaaaaaaaaaaagaauu

SEQ ID NO: 9206 - RNA, 1867 nt, Artificial Sequence
  mRNA Design a-1 (hSL-A64-N5) comprising derived and/or modified sequence from Pf(3D7)__XP_001351122.1__HsALB_Pf-CSP(19-272)_L(AAY)_Pf-CSP(346-3 65)_L(AAY)_PADRE_L(PVTN)_HBsAg (opt3)
aggagagucccgcagucggcguccagcggcucugcuuguucgugugugugucguugcaggccuuauucaagcuuaccaugaagugggugaccuucaucagccugcucuuucuuuucuccucugccuacucacuguuucaggaguaucaaugcuacggcaguagcuccaacacaagagucuugaaugaauuaaacuaugacaaugcugggacuaaccuguacaaugagcuagaaaugaacuauuacggaaaacaggagaauugguauucucucaagaaaaacucgaggucacugggugaaaaugaugacggcaacaaugaggauaacgagaaacuucggaagcccaagcacaagaaacugaagcagccugcagacgggaauccagauccgaacgccaaucccaacguugacccuaacgcgaauccaaacguggaucccaaugcuaacccuaauguagacccaaacgccaaucccaacgcaaauccuaacgccaauccaaacgcuaauccgaacgcaaaucccaacgccaacccuaaugcuaacccaaaugccaaccccaaugcgaacccuaaugcaaacccaaaugccaaccccaaugcuaacccgaaugccaacccuaaugcaaaccccaacgcuaauccaaacgccaauccuaacgcgaaucccaacguggauccaaaugccaaccccaaugcaaacccuaaugcuaacccaaaugccaacccgaaugcuaaccccaacgccaauccuaacgcaaauccaaacgccaaucccaacgcuaauccuaacgcgaauccaaacgcaaaucccaacgccaauccgaacgcuaauccuaacgccaauccaaacgcaaaccccaaugccaacccuaaugcuaaccccaaugccaacccagcagcguacauuaaaccuggaagcgcuaauaagcccaaagacgaauuggauuacgccaacgacauagaggcagccuaugcuaaguucgucgccgcauggacgcucaaggcugccgcgccagugaccaauauggaaaacaucacaaguggcuuucuggguccgcugcucguuuuacaggccggguucuuucugcuuacucgcauuuugaccaucccucaaucccuggauucuugguggacaagccuaaauuuccucggaggcucccccgugugucugggccagaacucacagaguccaaccagcaaucauucucccacuuccugcccuccaauuugucccggguaccgauggaugugccuucguagauuuaucauauuccuguuuaucuugcuccuguguuuaauuuuccugcucguccuucuggacuaucagggaauguugccugugugcccgcuaaucccagguucaacaaccacgaacacuggccccuguaaaaccugcacaacuccugcucaagggaauagcauguuuccaaguuguugcuguaccaagcccacagacggaaacuguaccugcauuccuaucccgucuuccugggcauucgccaaauaccugugggagugggcuagcguaagguucucguggcucucucugcuuguucccuuugugcagugguucgucggccuguccccaacggugugguugucagccauauggaugaugugguauugggguccuagucucuacagcauugugucccccuuuaucccacuguuaccuauuuucuuuugccugugggucuauaucugaggacuagucccuguucccagagcccacuuuuuuuucuuuuuuugaaauaaaauagccugucuuucagaucucaaaggcucuuuucagagccaccaaaaaaaaaaaaaaaaaaaaaaaaaaaaaaaaaaaaaaaaaaaaaaaaaaaaaaaaaaaaaaaaagaauu

SEQ ID NO: 9207 - RNA, 2086 nt, Artificial Sequence
  mRNA Design a-1 (hSL-A64-N5) comprising derived and/or modified sequence from Pf(3D7)__XP_001351122.1__HsALB_Pf-CSP(19-384)_L(PVTN)_HBsAg (opt3)
aggagagucccgcagucggcguccagcggcucugcuuguucgugugugugucguugcaggccuuauucaagcuuaccaugaagugggugaccuucaucagccugcucuuucuuuucuccucugccuacucacuguuucaggaguaucaaugcuacggcaguagcuccaacacaagagucuugaaugaauuaaacuaugacaaugcugggacuaaccuguacaaugagcuagaaaugaacuauuacggaaaacaggagaauugguauucucucaagaaaaacucgaggucacugggugaaaaugaugacggcaacaaugaggauaacgagaaacuucggaagcccaagcacaagaaacugaagcagccugcagacgggaauccagauccgaacgccaaucccaacguugacccuaacgcgaauccaaacguggaucccaaugcuaacccuaauguagacccaaacgccaaucccaacgcaaauccuaacgccaauccaaacgcuaauccgaacgcaaaucccaacgccaacccuaaugcuaacccaaaugccaaccccaaugcgaacccuaaugcaaacccaaaugccaaccccaaugcuaacccgaaugccaacccuaaugcaaaccccaacgcuaauccaaacgccaauccuaacgcgaaucccaacguggauccaaaugccaaccccaaugcaaacccuaaugcuaacccaaaugccaacccgaaugcuaaccccaacgccaauccuaacgcaaauccaaacgccaaucccaacgcuaauccuaacgcgaauccaaacgcaaaucccaacgccaauccgaacgcuaauccuaacgccaauccaaacgcaaaccccaaugccaacccuaaugcuaaccccaaugccaacccaaauaaaaacaaucagggaaacggccaaggucauaauaugccuaacgaccccaaucgcaacgucgaugaaaaugcaaacgcgaacagcgcugugaagaauaacaauaacgaggaaccaagugacaaacacauuaaggaguacuugaauaagauacagaacucccucucuacggaguggagcccguguuccguuaccugcgggaauggaauccaggugcgaauuaaaccuggcucagccaacaagcccaaagaugaacuggacuacgcaaaugacaucgagaagaaaauuuguaagauggaaaaaugcaguagcgucuucaacgugguaaauucuuccccaguuacaaacauggagaauaucacuucaggcuuucuggggccccucuuagugcugcaggccggauucuuucuuuugacccguauacugacaaucccucaaagccuagauaguugguggaccucucucaacuuccuggguggcuccccagucugucuugggcagaauagccagucgcccacuucuaaccauuccccuacaucaugcccgccaauuugucccggauauagauggaugugccugaggcgguuuaucauuuucuuguuuauccuccuguuaugucugauauuccuccuugugcuguuggacuaccagggcaugcuaccugugugcccacugauucccgguaguaccacgacuaacaccgggccuuguaagacaugcacuaccccggcucaaggaaauagcauguuucccuccugcuguugcacaaagccaaccgauggcaacuguacgugcaucccuauucccucuagcugggccuucgcaaaauaucucugggaaugggcuucaguccgcuucaguuggcugucccuucugguuccauuugugcagugguucguaggcuugagcccuacuguguggcucucugccaucuggaugaugugguacugggggcccucacuguauaguaucgucagcccauuuauuccguuacugccuauauucuuuugucuauggguguacaucugaggacuagucccuguucccagagcccacuuuuuuuucuuuuuuugaaauaaaauagccugucuuucagaucucaaaggcucuuuucagagccaccaaaaaaaaaaaaaaaaaaaaaaaaaaaaaaaaaaaaaaaaaaaaaaaaaaaaaaaaaaaaaaaaagaauu

SEQ ID NO: 9208 - RNA, 1903 nt, Artificial Sequence
  mRNA Design a-1 (hSL-A64-N5) comprising derived and/or modified sequence from Pf(3D7)__XP_001351122.1__HsALB_Pf-CSP(19-384)_L(SGG)_Ferritin (opt3)
aggagagucccgcagucggcguccagcggcucugcuuguucgugugugugucguugcaggccuuauucaagcuuaccaugaagugggugaccuucaucagccugcucuuucuuuucuccucugccuacucacuguuucaggaguaucaaugcuacggcaguagcuccaacacaagagucuugaaugaauuaaacuaugacaaugcugggacuaaccuguacaaugagcuagaaaugaacuauuacggaaaacaggagaauugguauucucucaagaaaaacucgaggucacugggugaaaaugaugacggcaacaaugaggauaacgagaaacuucggaagcccaagcacaagaaacugaagcagccugcagacgggaauccagauccgaacgccaaucccaacguugacccuaacgcgaauccaaacguggaucccaaugcuaacccuaauguagacccaaacgccaaucccaacgcaaauccuaacgccaauccaaacgcuaauccgaacgcaaaucccaacgccaacccuaaugcuaacccaaaugccaaccccaaugcgaacccuaaugcaaacccaaaugccaaccccaaugcuaacccgaaugccaacccuaaugcaaaccccaacgcuaauccaaacgccaauccuaacgcgaaucccaacguggauccaaaugccaaccccaaugcaaacccuaaugcuaacccaaaugccaacccgaaugcuaaccccaacgccaauccuaacgcaaauccaaacgccaaucccaacgcuaauccuaacgcgaauccaaacgcaaaucccaacgccaauccgaacgcuaauccuaacgccaauccaaacgcaaaccccaaugccaacccuaaugcuaaccccaaugccaacccaaauaaaaacaaucagggaaacggccaaggucauaauaugccuaacgaccccaaucgcaacgucgaugaaaaugcaaacgcgaacagcgcugugaagaauaacaauaacgaggaaccaagugacaaacacauuaaggaguacuugaauaagauacagaacucccucucuacggaguggagcccguguuccguuaccugcgggaauggaauccaggugcgaauuaaaccuggcucagccaacaagcccaaagaugaacuggacuacgcaaaugacaucgagaagaaaauuuguaagauggaaaaaugcaguagcgucuucaacgugguaaauucuuccucaggcgggcugagcaaggauaucauaaagcucuuaaacgagcagguuaauaaagaaaugaacaguucuaaucuguauauguccaugagcucgugguguuacacacauucucuugacggagccgguuuguuucuguucgaucacgcugccgaggaguaugaacaugcaaagaaacuaaucauuuuucucaacgagaacaaugugccaguccaacugacuuccaucucagcucccgaacacaaguucgagggccuuacccagauuuuucagaaagccuacgaacacgagcagcauaucagugagagcauaaacaauauuguggaccacgcgaucaaguccaaggaucaugccacauucaacuuucugcaaugguauguggcugaacagcacgaggaagaggucuuguucaaagacauucucgauaagaucgaacugaucgggaaugagaaccacggauuauaccuggcagaccaguauguuaaaggcauugccaagucucguaaaagcugaggacuagucccuguucccagagcccacuuuuuuuucuuuuuuugaaauaaaauagccugucuuucagaucucaaaggcucuuuucagagccaccaaaaaaaaaaaaaaaaaaaaaaaaaaaaaaaaaaaaaaaaaaaaaaaaaaaaaaaaaaaaaaaaagaauu

SEQ ID NO: 9209 - RNA, 1864 nt, Artificial Sequence
  mRNA Design a-1 (hSL-A64-N5) comprising derived and/or modified sequence from Pf(3D7)__XP_001351122.1__HsALB_Pf-CSP(93-384)_L(PVTN)_HBsAg (opt3)
aggagagucccgcagucggcguccagcggcucugcuuguucgugugugugucguugcaggccuuauucaagcuuaccaugaagugggugaccuucaucagccugcucuuucuuuucuccucugccuacucaaaacugaagcagcccgcugacggcaacccugauccaaaugcaaacccgaaugucgaccccaacgccaauccuaacguugauccaaaugcgaaccccaauguggacccuaacgcuaauccaaacgccaaucccaacgcaaauccuaacgccaacccaaaugcuaacccgaaugcaaaccccaaugccaacccuaaugcuaacccaaaugccaaccccaaugcgaacccuaaugcaaacccaaaugccaaccccaacgcuaauccgaacgccaauccuaacgcaaaucccaacgcuaauccaaacgccaauccuaacguagaucccaaugcgaacccaaaugccaaccccaaugcaaacccuaacgcuaauccaaacgccaauccgaacgcuaaucccaacgccaauccuaacgcaaauccaaacgccaaucccaacgcuaauccuaacgcgaauccaaacgcaaaccccaaugccaacccgaaugcuaacccuaaugccaacccaaaugcaaaccccaaugccaacccuaaugcuaaccccaauaaaaacaaucaagggaacggacagggucacaauaugccaaacgacccuaacagaaauguggaugagaacgccaaugcaaacagugcggucaagaauaacaauaacgaggaacccagcgacaaacauauuaaggaauauuugaauaagauacagaacuccuuaucuacagaguggucgccaugcucagugacuuguggcaaugggauccagguuaggauuaaaccgggaagcgcuaacaagccuaaagaugaacuggacuacgccaaugauaucgagaagaaaauuugcaagauggagaaguguaguuccguguuuaacgucguaaauucuagccccgugacgaacauggaaaacaucaccuccggcuuccuagguccacuccugguucuucaagcaggguuuuuccuguugacacggauacucacuaucccccagucacuggacaguugguggaccagccugaauuuucucggaggcucuccugugugcuuaggccagaacucccagucaccaacaagcaaucacagucccaccucuuguccuccgauuugcccaggguaucgcuggaugugucugcgacguuucaucauuuuucuuuucaucuugcugcuaugccucauauuucugcuuguccuguuggauuaccaaggaaugcuccccguguguccucugauuccagguuccacuacaaccaacacgggccccugcaaaacuuguaccacuccugcccaggggaauagcauguucccgucgugcugcuguacaaagcccaccgacggaaacugcacauguaucccaauuccuucuuccugggcuuuugccaaauauuuaugggagugggcaucagugagauucaguuggcugagccuccuuguccccuucguucagugguuugugggccuguccccaaccguaugguugucugcuaucuggaugaugugguacugggguccuagccuauauucaaucgugagucccuucauuccacugcucccgauauuuuucugccugugggucuacaucugaggacuagucccuguucccagagcccacuuuuuuuucuuuuuuugaaauaaaauagccugucuuucagaucucaaaggcucuuuucagagccaccaaaaaaaaaaaaaaaaaaaaaaaaaaaaaaaaaaaaaaaaaaaaaaaaaaaaaaaaaaaaaaaaagaauu

SEQ ID NO: 9210 - RNA, 1525 nt, Artificial Sequence; identical to SEQ ID NO: 6677
  mRNA Design a-1 (hSL-A64-N5) comprising derived and/or modified sequence from Pf(3D7)__XP_001351122.1__HsALB_Pf-CSP(199-377)_L(PVTN)_HBsAg (opt3)

SEQ ID NO: 9211 - RNA, 1222 nt, Artificial Sequence
  mRNA Design a-1 (hSL-A64-N5) comprising derived and/or modified sequence from Pf(3D7)__XP_001351122.1__HsALB_Pf-CSP(19-272)_L(AAY)_Pf-CSP(346-3 75)_L(AAY)_Pf-CSP(310-327) (opt3)
aggagagucccgcagucggcguccagcggcucugcuuguucgugugugugucguugcaggccuuauucaagcuuaccaugaagugggugaccuucaucagccugcucuuucuuuucuccucugccuacucacuguuucaggaguaucaaugcuacggcaguagcuccaacacaagagucuugaaugaauuaaacuaugacaaugcugggacuaaccuguacaaugagcuagaaaugaacuauuacggaaaacaggagaauugguauucucucaagaaaaacucgaggucacugggugaaaaugaugacggcaacaaugaggauaacgagaaacuucggaagcccaagcacaagaaacugaagcagccugcagacgggaauccagauccgaacgccaaucccaacguugacccuaacgcgaauccaaacguggaucccaaugcuaacccuaauguagacccaaacgccaaucccaacgcaaauccuaacgccaauccaaacgcuaauccgaacgcaaaucccaacgccaacccuaaugcuaacccaaaugccaaccccaaugcgaacccuaaugcaaacccaaaugccaaccccaaugcuaacccgaaugccaacccuaaugcaaaccccaacgcuaauccaaacgccaauccuaacgcgaaucccaacguggauccaaaugccaaccccaaugcaaacccuaaugcuaacccaaaugccaacccgaaugcuaaccccaacgccaauccuaacgcaaauccaaacgccaaucccaacgcuaauccuaacgcgaauccaaacgcaaaucccaacgccaauccgaacgcuaauccuaacgccaauccaaacgcaaaccccaaugccaacccuaaugcuaaccccaaugccaacccagcagcguacauuaaaccuggaagcgcuaauaagcccaaagacgaauuggauuacgccaacgacauagagaagaagaucuguaaaauggaaaagugcagugcagccuaugagccauccgauaaacauauuaaggaguaccucaauaaaauccagaacucucugugaggacuagucccuguucccagagcccacuuuuuuuucuuuuuuugaaauaaaauagccugucuuucagaucucaaaggcucuuuucagagccaccaaaaaaaaaaaaaaaaaaaaaaaaaaaaaaaaaaaaaaaaaaaaaaaaaaaaaaaaaaaaaaaaagaauu

SEQ ID NO: 9212 - RNA, 1270 nt, Artificial Sequence
  mRNA Design a-1 (hSL-A64-N5) comprising derived and/or modified sequence from Pf(3D7)__XP_001351122.1__HsALB_Pf-CSP(19-272)_L(AAY)_Pf-CSP(346-3 75)_L(AAY)_Pf-CSP(310-327)_L(AAY)_PADRE (opt3)
aggagagucccgcagucggcguccagcggcucugcuuguucgugugugugucguugcaggccuuauucaagcuuaccaugaagugggugaccuucaucagccugcucuuucuuuucuccucugccuacucacuguuucaggaguaucaaugcuacggcaguagcuccaacacaagagucuugaaugaauuaaacuaugacaaugcugggacuaaccuguacaaugagcuagaaaugaacuauuacggaaaacaggagaauugguauucucucaagaaaaacucgaggucacugggugaaaaugaugacggcaacaaugaggauaacgagaaacuucggaagcccaagcacaagaaacugaagcagccugcagacgggaauccagauccgaacgccaaucccaacguugacccuaacgcgaauccaaacguggaucccaaugcuaacccuaauguagacccaaacgccaaucccaacgcaaauccuaacgccaauccaaacgcuaauccgaacgcaaaucccaacgccaacccuaaugcuaacccaaaugccaaccccaaugcgaacccuaaugcaaacccaaaugccaaccccaaugcuaacccgaaugccaacccuaaugcaaaccccaacgcuaauccaaacgccaauccuaacgcgaaucccaacguggauccaaaugccaaccccaaugcaaacccuaaugcuaacccaaaugccaacccgaaugcuaaccccaacgccaauccuaacgcaaauccaaacgccaaucccaacgcuaauccuaacgcgaauccaaacgcaaaucccaacgccaauccgaacgcuaauccuaacgccaauccaaacgcaaaccccaaugccaacccuaaugcuaaccccaaugccaacccagcagcguacauuaaaccuggaagcgcuaauaagcccaaagacgaauuggauuacgccaacgacauagagaagaagaucuguaaaauggaaaagugcagugcagccuaugagccauccgauaaacauauuaaggaguaccucaauaaaauccagaacucucuggcugccuaugcaaaguucgucgcugccuggacgcugaaagcggccgcuugaggacuagucccuguucccagagcccacuuuuuuuucuuuuuuugaaauaaaauagccugucuuucagaucucaaaggcucuuuucagagccaccaaaaaaaaaaaaaaaaaaaaaaaaaaaaaaaaaaaaaaaaaaaaaaaaaaaaaaaaaaaaaaaaagaauu

SEQ ID NO: 9213 - RNA, 1270 nt, Artificial Sequence
  mRNA Design a-1 (hSL-A64-N5) comprising derived and/or modified sequence from Pf(3D7)__XP_001351122.1__HsALB_Pf-CSP(19-272)_L(AAY)_Pf-CSP(310-3 27)_L(AAY)_Pf-CSP(346-375)_L(AAY)_PADRE (opt3)
aggagagucccgcagucggcguccagcggcucugcuuguucgugugugugucguugcaggccuuauucaagcuuaccaugaagugggugaccuucaucagccugcucuuucuuuucuccucugccuacucacuguuucaggaguaucaaugcuacggcaguagcuccaacacaagagucuugaaugaauuaaacuaugacaaugcugggacuaaccuguacaaugagcuagaaaugaacuauuacggaaaacaggagaauugguauucucucaagaaaaacucgaggucacugggugaaaaugaugacggcaacaaugaggauaacgagaaacuucggaagcccaagcacaagaaacugaagcagccugcagacgggaauccagauccgaacgccaaucccaacguugacccuaacgcgaauccaaacguggaucccaaugcuaacccuaauguagacccaaacgccaaucccaacgcaaauccuaacgccaauccaaacgcuaauccgaacgcaaaucccaacgccaacccuaaugcuaacccaaaugccaaccccaaugcgaacccuaaugcaaacccaaaugccaaccccaaugcuaacccgaaugccaacccuaaugcaaaccccaacgcuaauccaaacgccaauccuaacgcgaaucccaacguggauccaaaugccaaccccaaugcaaacccuaaugcuaacccaaaugccaacccgaaugcuaaccccaacgccaauccuaacgcaaauccaaacgccaaucccaacgcuaauccuaacgcgaauccaaacgcaaaucccaacgccaauccgaacgcuaauccuaacgccaauccaaacgcaaaccccaaugccaacccuaaugcuaaccccaaugccaacccagcagcguacgaaccuagcgacaaacauauuaaggaguacuugaauaaaauacagaacagucucgcugccuauaucaagcccggauccgcaaauaagccaaaagaugaacuggacuacgccaacgauauugagaagaaaaucuguaagauggagaaaugcucugcugccuaugcaaaguucgucgcugccuggacgcugaaagcggccgcuugaggacuagucccuguucccagagcccacuuuuuuuucuuuuuuugaaauaaaauagccugucuuucagaucucaaaggcucuuuucagagccaccaaaaaaaaaaaaaaaaaaaaaaaaaaaaaaaaaaaaaaaaaaaaaaaaaaaaaaaaaaaaaaaaagaauu

SEQ ID NO: 9214 - RNA, 1324 nt, Artificial Sequence
  mRNA Design a-1 (hSL-A64-N5) comprising derived and/or modified sequence from Pf(3D7)__XP_001351122.1__HsALB_Pf-CSP(19-272)_L(AAY)_Pf-CSP(310-3 27)_L(AAY)_Pf-CSP(346-375)_L(AAY)_PADRE_L(AAY)_P2 (opt3)
aggagagucccgcagucggcguccagcggcucugcuuguucgugugugugucguugcaggccuuauucaagcuuaccaugaagugggugaccuucaucagccugcucuuucuuuucuccucugccuacucacuguuucaggaguaucaaugcuacggcaguagcuccaacacaagagucuugaaugaauuaaacuaugacaaugcugggacuaaccuguacaaugagcuagaaaugaacuauuacggaaaacaggagaauugguauucucucaagaaaaacucgaggucacugggugaaaaugaugacggcaacaaugaggauaacgagaaacuucggaagcccaagcacaagaaacugaagcagccugcagacgggaauccagauccgaacgccaaucccaacguugacccuaacgcgaauccaaacguggaucccaaugcuaacccuaauguagacccaaacgccaaucccaacgcaaauccuaacgccaauccaaacgcuaauccgaacgcaaaucccaacgccaacccuaaugcuaacccaaaugccaaccccaaugcgaacccuaaugcaaacccaaaugccaaccccaaugcuaacccgaaugccaacccuaaugcaaaccccaacgcuaauccaaacgccaauccuaacgcgaaucccaacguggauccaaaugccaaccccaaugcaaacccuaaugcuaacccaaaugccaacccgaaugcuaaccccaacgccaauccuaacgcaaauccaaacgccaaucccaacgcuaauccuaacgcgaauccaaacgcaaaucccaacgccaauccgaacgcuaauccuaacgccaauccaaacgcaaaccccaaugccaacccuaaugcuaaccccaaugccaacccagcagcguacgaaccuagcgacaaacauauuaaggaguacuugaauaaaauacagaacagucucgcugccuauaucaagcccggauccgcaaauaagccaaaagaugaacuggacuacgccaacgauauugagaagaaaaucuguaagauggagaaaugcucugcugccuaugcaaaguucgucgcugccuggacgcugaaagcggccgcugcagccuaccaauauauuaaggcuaauagcaaguuuaucggcauaaccgaacucugaggacuagucccuguucccagagcccacuuuuuuuucuuuuuuugaaauaaaauagccugucuuucagaucucaaaggcucuuuucagagccaccaaaaaaaaaaaaaaaaaaaaaaaaaaaaaaaaaaaaaaaaaaaaaaaaaaaaaaaaaaaaaaaaagaauu

SEQ ID NO: 9215 - RNA, 1288 nt, Artificial Sequence
  mRNA Design a-1 (hSL-A64-N5) comprising derived and/or modified sequence from Pf(3D7)__XP_001351122.1__HsALB_Pf-CSP(19-272)_L(AAY)_Pf-CSP(310-3 27)_Linker (AAY)_Pf-CSP(346-397) (opt3)
aggagagucccgcagucggcguccagcggcucugcuuguucgugugugugucguugcaggccuuauucaagcuuaccaugaagugggugaccuucaucagccugcucuuucuuuucuccucugccuacucacuguuucaggaguaucaaugcuacggcaguagcuccaacacaagagucuugaaugaauuaaacuaugacaaugcugggacuaaccuguacaaugagcuagaaaugaacuauuacggaaaacaggagaauugguauucucucaagaaaaacucgaggucacugggugaaaaugaugacggcaacaaugaggauaacgagaaguuacggaaacccaagcacaagaaacugaagcagccugcagacgggaauccagauccgaacgccaaucccaacguugacccuaacgcgaauccaaacguggaucccaaugcuaacccuaauguagacccaaacgccaaucccaacgcaaauccuaacgccaauccaaacgcuaauccgaacgcaaaucccaacgccaacccuaaugcuaacccaaaugccaaccccaaugcgaacccuaaugcaaacccaaaugccaaccccaaugcuaacccgaaugccaacccuaaugcaaaccccaacgcuaauccaaacgccaauccuaacgcgaaucccaacguggauccaaaugccaaccccaaugcaaacccuaaugcuaacccaaaugccaacccgaaugcuaaccccaacgccaauccuaacgcaaauccaaacgccaaucccaacgcuaauccuaacgcgaauccaaacgcaaaucccaacgccaauccgaacgcuaauccuaacgccaauccaaacgcaaaccccaaugccaacccuaaugcuaaccccaaugccaacccagcagcguacgaaccuagcgacaaacauauuaaggaguacuugaauaaaauacagaacagucucgcugccuauaucaagcccggauccgcaaauaagccaaaagaugaacuggacuacgccaacgauauugagaagaaaaucuguaagauggagaaaugcucuagcgucuucaaugugguuaacuccucaauuggccugaucauggugcucaguuuucuuuuccugaauugaggacuagucccuguucccagagcccacuuuuuuuucuuuuuuugaaauaaaauagccugucuuucagaucucaaaggcucuuuucagagccaccaaaaaaaaaaaaaaaaaaaaaaaaaaaaaaaaaaaaaaaaaaaaaaaaaaaaaaaaaaaaaaaaagaauu

SEQ ID NO: 9216 - RNA, 1888 nt, Artificial Sequence
  mRNA Design a-1 (hSL-A64-N5) comprising derived and/or modified sequence from Pf(3D7)__XP_001351122.1__LumSynt_L(GGS4-GGG)_Pf-CSP(19-397) (opt4)
aggagagucccgcagucggcguccagcggcucugcuuguucgugugugugucguugcaggccuuauucaagcuuaccaugcagaucuacgagggcaagcugaccgccgagggccugagauucggcaucguggccagcagauucaaccacgcccugguggacagacugguggagggcgccaucgacgccaucgugagacacggcggcagagaggaggacaucacccuggugagagugcccggcagcugggagauccccguggccgccggcgagcuggccagaaaggaggacaucgacgccgugaucgccaucggcgugcugaucagaggcgccaccccccacuucgacuacaucgccagcgaggugagcaagggccuggccgaccugagccuggagcugagaaagcccaucaccuucggcgugaucaccgccgacacccuggagcaggccaucgagagagccggcaccaagcacggcaacaagggcugggaggccgcccugagcgccaucgagauggccaaccuguucaagagccugagaggcggcagcggcggcagcggcggcagcggcggcagcggcggcggccuguuccaggaguaccagugcuacggcagcagcagcaacaccagagugcugaacgagcugaacuacgacaacgccggcaccaaccuguacaacgagcuggagaugaacuacuacggcaagcaggagaacugguacagccugaagaagaacagcagaagccugggcgagaacgacgacggcaacaacgaggacaacgagaagcugagaaagcccaagcacaagaagcugaagcagcccgccgacggcaaccccgaccccaacgccaaccccaacguggaccccaacgccaaccccaacguggaccccaacgccaaccccaacguggaccccaacgccaaccccaacgccaaccccaacgccaaccccaacgccaaccccaacgccaaccccaacgccaaccccaacgccaaccccaacgccaaccccaacgccaaccccaacgccaaccccaacgccaaccccaacgccaaccccaacgccaaccccaacgccaaccccaacgccaaccccaacgccaaccccaacgccaaccccaacguggaccccaacgccaaccccaacgccaaccccaacgccaaccccaacgccaaccccaacgccaaccccaacgccaaccccaacgccaaccccaacgccaaccccaacgccaaccccaacgccaaccccaacgccaaccccaacgccaaccccaacgccaaccccaacgccaaccccaacgccaaccccaacgccaaccccaacgccaaccccaacgccaaccccaacaagaacaaccagggcaacggccagggccacaacaugcccaacgaccccaacagaaacguggacgagaacgccaacgccaacagcgccgugaagaacaacaacaacgaggagcccagcgacaagcacaucaaggaguaccugaacaagauccagaacagccugagcaccgaguggagccccugcagcgugaccugcggcaacggcauccaggugagaaucaagcccggcagcgccaacaagcccaaggacgagcuggacuacgccaacgacaucgagaagaagaucugcaagauggagaagugcagcagcguguucaacguggugaacagcagcaucggccugaucauggugcugagcuuccuguuccugaacugaggacuagucccuguucccagagcccacuuuuuuuucuuuuuuugaaauaaaauagccugucuuucagaucucaaaggcucuuuucagagccaccaaaaaaaaaaaaaaaaaaaaaaaaaaaaaaaaaaaaaaaaaaaaaaaaaaaaaaaaaaaaaaaaagaauu

SEQ ID NO: 9217 - RNA, 1750 nt, Artificial Sequence
  mRNA Design a-1 (hSL-A64-N5) comprising derived and/or modified sequence from Pf(3D7)__XP_001351122.1__HsALB_Pf-CSP(19-272)_L(PVTN)_HBsAg (opt4)
aggagagucccgcagucggcguccagcggcucugcuuguucgugugugugucguugcaggccuuauucaagcuuaccaugaagugggugaccuucaucagccugcuguuccuguucagcagcgccuacagccuguuccaggaguaccagugcuacggcagcagcagcaacaccagagugcugaacgagcugaacuacgacaacgccggcaccaaccuguacaacgagcuggagaugaacuacuacggcaagcaggagaacugguacagccugaagaagaacagcagaagccugggcgagaacgacgacggcaacaacgaggacaacgagaagcugagaaagcccaagcacaagaagcugaagcagcccgccgacggcaaccccgaccccaacgccaaccccaacguggaccccaacgccaaccccaacguggaccccaacgccaaccccaacguggaccccaacgccaaccccaacgccaaccccaacgccaaccccaacgccaaccccaacgccaaccccaacgccaaccccaacgccaaccccaacgccaaccccaacgccaaccccaacgccaaccccaacgccaaccccaacgccaaccccaacgccaaccccaacgccaaccccaacgccaaccccaacgccaaccccaacgccaaccccaacguggaccccaacgccaaccccaacgccaaccccaacgccaaccccaacgccaaccccaacgccaaccccaacgccaaccccaacgccaaccccaacgccaaccccaacgccaaccccaacgccaaccccaacgccaaccccaacgccaaccccaacgccaaccccaacgccaaccccaacgccaaccccaacgccaaccccaacgccaaccccaacgccaacccccccgugaccaacauggagaacaucaccagcggcuuccugggcccccugcuggugcugcaggccggcuucuuccugcugaccagaauccugaccaucccccagagccuggacagcugguggaccagccugaacuuccugggcggcagccccgugugccugggccagaacagccagagccccaccagcaaccacagccccaccagcugcccccccaucugccccggcuacagauggaugugccugagaagauucaucaucuuccuguucauccugcugcugugccugaucuuccugcuggugcugcuggacuaccagggcaugcugcccgugugcccccugauccccggcagcaccaccaccaacaccggccccugcaagaccugcaccacccccgcccagggcaacagcauguuccccagcugcugcugcaccaagcccaccgacggcaacugcaccugcauccccauccccagcagcugggccuucgccaaguaccugugggagugggccagcgugagauucagcuggcugagccugcuggugcccuucgugcagugguucgugggccugagccccaccguguggcugagcgccaucuggaugaugugguacuggggccccagccuguacagcaucgugagccccuucaucccccugcugcccaucuucuucugccuguggguguacaucugaggacuagucccuguucccagagcccacuuuuuuuucuuuuuuugaaauaaaauagccugucuuucagaucucaaaggcucuuuucagagccaccaaaaaaaaaaaaaaaaaaaaaaaaaaaaaaaaaaaaaaaaaaaaaaaaaaaaaaaaaaaaaaaaagaauu

SEQ ID NO: 9218 - RNA, 1867 nt, Artificial Sequence
  mRNA Design a-1 (hSL-A64-N5) comprising derived and/or modified sequence from Pf(3D7)__XP_001351122.1__HsALB_Pf-CSP(19-272)_L(AAY)_Pf-CSP(346-3 65)_L(AAY)_PADRE_L(PVTN)_HBsAg (opt4)
aggagagucccgcagucggcguccagcggcucugcuuguucgugugugugucguugcaggccuuauucaagcuuaccaugaagugggugaccuucaucagccugcuguuccuguucagcagcgccuacagccuguuccaggaguaccagugcuacggcagcagcagcaacaccagagugcugaacgagcugaacuacgacaacgccggcaccaaccuguacaacgagcuggagaugaacuacuacggcaagcaggagaacugguacagccugaagaagaacagcagaagccugggcgagaacgacgacggcaacaacgaggacaacgagaagcugagaaagcccaagcacaagaagcugaagcagcccgccgacggcaaccccgaccccaacgccaaccccaacguggaccccaacgccaaccccaacguggaccccaacgccaaccccaacguggaccccaacgccaaccccaacgccaaccccaacgccaaccccaacgccaaccccaacgccaaccccaacgccaaccccaacgccaaccccaacgccaaccccaacgccaaccccaacgccaaccccaacgccaaccccaacgccaaccccaacgccaaccccaacgccaaccccaacgccaaccccaacgccaaccccaacgccaaccccaacguggaccccaacgccaaccccaacgccaaccccaacgccaaccccaacgccaaccccaacgccaaccccaacgccaaccccaacgccaaccccaacgccaaccccaacgccaaccccaacgccaaccccaacgccaaccccaacgccaaccccaacgccaaccccaacgccaaccccaacgccaaccccaacgccaaccccaacgccaaccccaacgccaaccccgccgccuacaucaagcccggcagcgccaacaagcccaaggacgagcuggacuacgccaacgacaucgaggccgccuacgccaaguucguggccgccuggacccugaaggccgccgcccccgugaccaacauggagaacaucaccagcggcuuccugggcccccugcuggugcugcaggccggcuucuuccugcugaccagaauccugaccaucccccagagccuggacagcugguggaccagccugaacuuccugggcggcagccccgugugccugggccagaacagccagagccccaccagcaaccacagccccaccagcugcccccccaucugccccggcuacagauggaugugccugagaagauucaucaucuuccuguucauccugcugcugugccugaucuuccugcuggugcugcuggacuaccagggcaugcugcccgugugcccccugauccccggcagcaccaccaccaacaccggccccugcaagaccugcaccacccccgcccagggcaacagcauguuccccagcugcugcugcaccaagcccaccgacggcaacugcaccugcauccccauccccagcagcugggccuucgccaaguaccugugggagugggccagcgugagauucagcuggcugagccugcuggugcccuucgugcagugguucgugggccugagccccaccguguggcugagcgccaucuggaugaugugguacuggggccccagccuguacagcaucgugagccccuucaucccccugcugcccaucuucuucugccuguggguguacaucugaggacuagucccuguucccagagcccacuuuuuuuucuuuuuuugaaauaaaauagccugucuuucagaucucaaaggcucuuuucagagccaccaaaaaaaaaaaaaaaaaaaaaaaaaaaaaaaaaaaaaaaaaaaaaaaaaaaaaaaaaaaaaaaaagaauu

SEQ ID NO: 9219 - RNA, 2086 nt, Artificial Sequence
  mRNA Design a-1 (hSL-A64-N5) comprising derived and/or modified sequence from Pf(3D7)__XP_001351122.1__HsALB_Pf-CSP(19-384)_L(PVTN)_HBsAg (opt4)
aggagagucccgcagucggcguccagcggcucugcuuguucgugugugugucguugcaggccuuauucaagcuuaccaugaagugggugaccuucaucagccugcuguuccuguucagcagcgccuacagccuguuccaggaguaccagugcuacggcagcagcagcaacaccagagugcugaacgagcugaacuacgacaacgccggcaccaaccuguacaacgagcuggagaugaacuacuacggcaagcaggagaacugguacagccugaagaagaacagcagaagccugggcgagaacgacgacggcaacaacgaggacaacgagaagcugagaaagcccaagcacaagaagcugaagcagcccgccgacggcaaccccgaccccaacgccaaccccaacguggaccccaacgccaaccccaacguggaccccaacgccaaccccaacguggaccccaacgccaaccccaacgccaaccccaacgccaaccccaacgccaaccccaacgccaaccccaacgccaaccccaacgccaaccccaacgccaaccccaacgccaaccccaacgccaaccccaacgccaaccccaacgccaaccccaacgccaaccccaacgccaaccccaacgccaaccccaacgccaaccccaacgccaaccccaacguggaccccaacgccaaccccaacgccaaccccaacgccaaccccaacgccaaccccaacgccaaccccaacgccaaccccaacgccaaccccaacgccaaccccaacgccaaccccaacgccaaccccaacgccaaccccaacgccaaccccaacgccaaccccaacgccaaccccaacgccaaccccaacgccaaccccaacgccaaccccaacgccaaccccaacaagaacaaccagggcaacggccagggccacaacaugcccaacgaccccaacagaaacguggacgagaacgccaacgccaacagcgccgugaagaacaacaacaacgaggagcccagcgacaagcacaucaaggaguaccugaacaagauccagaacagccugagcaccgaguggagccccugcagcgugaccugcggcaacggcauccaggugagaaucaagcccggcagcgccaacaagcccaaggacgagcuggacuacgccaacgacaucgagaagaagaucugcaagauggagaagugcagcagcguguucaacguggugaacagcagccccgugaccaacauggagaacaucaccagcggcuuccugggcccccugcuggugcugcaggccggcuucuuccugcugaccagaauccugaccaucccccagagccuggacagcugguggaccagccugaacuuccugggcggcagccccgugugccugggccagaacagccagagccccaccagcaaccacagccccaccagcugcccccccaucugccccggcuacagauggaugugccugagaagauucaucaucuuccuguucauccugcugcugugccugaucuuccugcuggugcugcuggacuaccagggcaugcugcccgugugcccccugauccccggcagcaccaccaccaacaccggccccugcaagaccugcaccacccccgcccagggcaacagcauguuccccagcugcugcugcaccaagcccaccgacggcaacugcaccugcauccccauccccagcagcugggccuucgccaaguaccugugggagugggccagcgugagauucagcuggcugagccugcuggugcccuucgugcagugguucgugggccugagccccaccguguggcugagcgccaucuggaugaugugguacuggggccccagccuguacagcaucgugagccccuucaucccccugcugcccaucuucuucugccuguggguguacaucugaggacuagucccuguucccagagcccacuuuuuuuucuuuuuuugaaauaaaauagccugucuuucagaucucaaaggcucuuuucagagccaccaaaaaaaaaaaaaaaaaaaaaaaaaaaaaaaaaaaaaaaaaaaaaaaaaaaaaaaaaaaaaaaaagaauu

SEQ ID NO: 9220 - RNA, 1903 nt, Artificial Sequence
  mRNA Design a-1 (hSL-A64-N5) comprising derived and/or modified sequence from Pf(3D7)__XP_001351122.1__HsALB_Pf-CSP(19-384)_L(SGG)_Ferritin (opt4)
aggagagucccgcagucggcguccagcggcucugcuuguucgugugugugucguugcaggccuuauucaagcuuaccaugaagugggugaccuucaucagccugcuguuccuguucagcagcgccuacagccuguuccaggaguaccagugcuacggcagcagcagcaacaccagagugcugaacgagcugaacuacgacaacgccggcaccaaccuguacaacgagcuggagaugaacuacuacggcaagcaggagaacugguacagccugaagaagaacagcagaagccugggcgagaacgacgacggcaacaacgaggacaacgagaagcugagaaagcccaagcacaagaagcugaagcagcccgccgacggcaaccccgaccccaacgccaaccccaacguggaccccaacgccaaccccaacguggaccccaacgccaaccccaacguggaccccaacgccaaccccaacgccaaccccaacgccaaccccaacgccaaccccaacgccaaccccaacgccaaccccaacgccaaccccaacgccaaccccaacgccaaccccaacgccaaccccaacgccaaccccaacgccaaccccaacgccaaccccaacgccaaccccaacgccaaccccaacgccaaccccaacgccaaccccaacguggaccccaacgccaaccccaacgccaaccccaacgccaaccccaacgccaaccccaacgccaaccccaacgccaaccccaacgccaaccccaacgccaaccccaacgccaaccccaacgccaaccccaacgccaaccccaacgccaaccccaacgccaaccccaacgccaaccccaacgccaaccccaacgccaaccccaacgccaaccccaacgccaaccccaacaagaacaaccagggcaacggccagggccacaacaugcccaacgaccccaacagaaacguggacgagaacgccaacgccaacagcgccgugaagaacaacaacaacgaggagcccagcgacaagcacaucaaggaguaccugaacaagauccagaacagccugagcaccgaguggagccccugcagcgugaccugcggcaacggcauccaggugagaaucaagcccggcagcgccaacaagcccaaggacgagcuggacuacgccaacgacaucgagaagaagaucugcaagauggagaagugcagcagcguguucaacguggugaacagcagcagcggcggccugagcaaggacaucaucaagcugcugaacgagcaggugaacaaggagaugaacagcagcaaccuguacaugagcaugagcagcuggugcuacacccacagccuggacggcgccggccuguuccuguucgaccacgccgccgaggaguacgagcacgccaagaagcugaucaucuuccugaacgagaacaacgugcccgugcagcugaccagcaucagcgcccccgagcacaaguucgagggccugacccagaucuuccagaaggccuacgagcacgagcagcacaucagcgagagcaucaacaacaucguggaccacgccaucaagagcaaggaccacgccaccuucaacuuccugcagugguacguggccgagcagcacgaggaggaggugcuguucaaggacauccuggacaagaucgagcugaucggcaacgagaaccacggccuguaccuggccgaccaguacgugaagggcaucgccaagagcagaaagagcugaggacuagucccuguucccagagcccacuuuuuuuucuuuuuuugaaauaaaauagccugucuuucagaucucaaaggcucuuuucagagccaccaaaaaaaaaaaaaaaaaaaaaaaaaaaaaaaaaaaaaaaaaaaaaaaaaaaaaaaaaaaaaaaaagaauu

SEQ ID NO: 9221 - RNA, 1864 nt, Artificial Sequence
  mRNA Design a-1 (hSL-A64-N5) comprising derived and/or modified sequence from Pf(3D7)__XP_001351122.1__HsALB_Pf-CSP(93-384)_L(PVTN)_HBsAg (opt4)
aggagagucccgcagucggcguccagcggcucugcuuguucgugugugugucguugcaggccuuauucaagcuuaccaugaagugggugaccuucaucagccugcuguuccuguucagcagcgccuacagcaagcugaagcagcccgccgacggcaaccccgaccccaacgccaaccccaacguggaccccaacgccaaccccaacguggaccccaacgccaaccccaacguggaccccaacgccaaccccaacgccaaccccaacgccaaccccaacgccaaccccaacgccaaccccaacgccaaccccaacgccaaccccaacgccaaccccaacgccaaccccaacgccaaccccaacgccaaccccaacgccaaccccaacgccaaccccaacgccaaccccaacgccaaccccaacgccaaccccaacgccaaccccaacguggaccccaacgccaaccccaacgccaaccccaacgccaaccccaacgccaaccccaacgccaaccccaacgccaaccccaacgccaaccccaacgccaaccccaacgccaaccccaacgccaaccccaacgccaaccccaacgccaaccccaacgccaaccccaacgccaaccccaacgccaaccccaacgccaaccccaacgccaaccccaacgccaaccccaacaagaacaaccagggcaacggccagggccacaacaugcccaacgaccccaacagaaacguggacgagaacgccaacgccaacagcgccgugaagaacaacaacaacgaggagcccagcgacaagcacaucaaggaguaccugaacaagauccagaacagccugagcaccgaguggagccccugcagcgugaccugcggcaacggcauccaggugagaaucaagcccggcagcgccaacaagcccaaggacgagcuggacuacgccaacgacaucgagaagaagaucugcaagauggagaagugcagcagcguguucaacguggugaacagcagccccgugaccaacauggagaacaucaccagcggcuuccugggcccccugcuggugcugcaggccggcuucuuccugcugaccagaauccugaccaucccccagagccuggacagcugguggaccagccugaacuuccugggcggcagccccgugugccugggccagaacagccagagccccaccagcaaccacagccccaccagcugcccccccaucugccccggcuacagauggaugugccugagaagauucaucaucuuccuguucauccugcugcugugccugaucuuccugcuggugcugcuggacuaccagggcaugcugcccgugugcccccugauccccggcagcaccaccaccaacaccggccccugcaagaccugcaccacccccgcccagggcaacagcauguuccccagcugcugcugcaccaagcccaccgacggcaacugcaccugcauccccauccccagcagcugggccuucgccaaguaccugugggagugggccagcgugagauucagcuggcugagccugcuggugcccuucgugcagugguucgugggccugagccccaccguguggcugagcgccaucuggaugaugugguacuggggccccagccuguacagcaucgugagccccuucaucccccugcugcccaucuucuucugccuguggguguacaucugaggacuagucccuguucccagagcccacuuuuuuuucuuuuuuugaaauaaaauagccugucuuucagaucucaaaggcucuuuucagagccaccaaaaaaaaaaaaaaaaaaaaaaaaaaaaaaaaaaaaaaaaaaaaaaaaaaaaaaaaaaaaaaaaagaauu

SEQ ID NO: 9222 - RNA, 1525 nt, Artificial Sequence; identical to SEQ ID NO: 6707
  mRNA Design a-1 (hSL-A64-N5) comprising derived and/or modified sequence from Pf(3D7)__XP_001351122.1__HsALB_Pf-CSP(199-377)_L(PVTN)_HBsAg (opt4)

SEQ ID NO: 9223 - RNA, 1222 nt, Artificial Sequence
  mRNA Design a-1 (hSL-A64-N5) comprising derived and/or modified sequence from Pf(3D7)__XP_001351122.1__HsALB_Pf-CSP(19-272)_L(AAY)_Pf-CSP(346-3 75)_L(AAY)_Pf-CSP(310-327) (opt4)
aggagagucccgcagucggcguccagcggcucugcuuguucgugugugugucguugcaggccuuauucaagcuuaccaugaagugggugaccuucaucagccugcuguuccuguucagcagcgccuacagccuguuccaggaguaccagugcuacggcagcagcagcaacaccagagugcugaacgagcugaacuacgacaacgccggcaccaaccuguacaacgagcuggagaugaacuacuacggcaagcaggagaacugguacagccugaagaagaacagcagaagccugggcgagaacgacgacggcaacaacgaggacaacgagaagcugagaaagcccaagcacaagaagcugaagcagcccgccgacggcaaccccgaccccaacgccaaccccaacguggaccccaacgccaaccccaacguggaccccaacgccaaccccaacguggaccccaacgccaaccccaacgccaaccccaacgccaaccccaacgccaaccccaacgccaaccccaacgccaaccccaacgccaaccccaacgccaaccccaacgccaaccccaacgccaaccccaacgccaaccccaacgccaaccccaacgccaaccccaacgccaaccccaacgccaaccccaacgccaaccccaacgccaaccccaacguggaccccaacgccaaccccaacgccaaccccaacgccaaccccaacgccaaccccaacgccaaccccaacgccaaccccaacgccaaccccaacgccaaccccaacgccaaccccaacgccaaccccaacgccaaccccaacgccaaccccaacgccaaccccaacgccaaccccaacgccaaccccaacgccaaccccaacgccaaccccaacgccaaccccgccgccuacaucaagcccggcagcgccaacaagcccaaggacgagcuggacuacgccaacgacaucgagaagaagaucugcaagauggagaagugcagcgccgccuacgagcccagcgacaagcacaucaaggaguaccugaacaagauccagaacagccugugaggacuagucccuguucccagagcccacuuuuuuuucuuuuuuugaaauaaaauagccugucuuucagaucucaaaggcucuuuucagagccaccaaaaaaaaaaaaaaaaaaaaaaaaaaaaaaaaaaaaaaaaaaaaaaaaaaaaaaaaaaaaaaaaagaauu

SEQ ID NO: 9224 - RNA, 1270 nt, Artificial Sequence
  mRNA Design a-1 (hSL-A64-N5) comprising derived and/or modified sequence from Pf(3D7)__XP_001351122.1__HsALB_Pf-CSP(19-272)_L(AAY)_Pf-CSP(346-3 75)_L(AAY)_Pf-CSP(310-327)_L(AAY)_PADRE (opt4)
aggagagucccgcagucggcguccagcggcucugcuuguucgugugugugucguugcaggccuuauucaagcuuaccaugaagugggugaccuucaucagccugcuguuccuguucagcagcgccuacagccuguuccaggaguaccagugcuacggcagcagcagcaacaccagagugcugaacgagcugaacuacgacaacgccggcaccaaccuguacaacgagcuggagaugaacuacuacggcaagcaggagaacugguacagccugaagaagaacagcagaagccugggcgagaacgacgacggcaacaacgaggacaacgagaagcugagaaagcccaagcacaagaagcugaagcagcccgccgacggcaaccccgaccccaacgccaaccccaacguggaccccaacgccaaccccaacguggaccccaacgccaaccccaacguggaccccaacgccaaccccaacgccaaccccaacgccaaccccaacgccaaccccaacgccaaccccaacgccaaccccaacgccaaccccaacgccaaccccaacgccaaccccaacgccaaccccaacgccaaccccaacgccaaccccaacgccaaccccaacgccaaccccaacgccaaccccaacgccaaccccaacgccaaccccaacguggaccccaacgccaaccccaacgccaaccccaacgccaaccccaacgccaaccccaacgccaaccccaacgccaaccccaacgccaaccccaacgccaaccccaacgccaaccccaacgccaaccccaacgccaaccccaacgccaaccccaacgccaaccccaacgccaaccccaacgccaaccccaacgccaaccccaacgccaaccccaacgccaaccccgccgccuacaucaagcccggcagcgccaacaagcccaaggacgagcuggacuacgccaacgacaucgagaagaagaucugcaagauggagaagugcagcgccgccuacgagcccagcgacaagcacaucaaggaguaccugaacaagauccagaacagccuggccgccuacgccaaguucguggccgccuggacccugaaggccgccgccugaggacuagucccuguucccagagcccacuuuuuuuucuuuuuuugaaauaaaauagccugucuuucagaucucaaaggcucuuuucagagccaccaaaaaaaaaaaaaaaaaaaaaaaaaaaaaaaaaaaaaaaaaaaaaaaaaaaaaaaaaaaaaaaaagaauu

SEQ ID NO: 9225 - RNA, 1270 nt, Artificial Sequence
  mRNA Design a-1 (hSL-A64-N5) comprising derived and/or modified sequence from Pf(3D7)__XP_001351122.1__HsALB_Pf-CSP(19-272)_L(AAY)_Pf-CSP(310-3 27)_L(AAY)_Pf-CSP(346-375)_L(AAY)_PADRE (opt4)
aggagagucccgcagucggcguccagcggcucugcuuguucgugugugugucguugcaggccuuauucaagcuuaccaugaagugggugaccuucaucagccugcuguuccuguucagcagcgccuacagccuguuccaggaguaccagugcuacggcagcagcagcaacaccagagugcugaacgagcugaacuacgacaacgccggcaccaaccuguacaacgagcuggagaugaacuacuacggcaagcaggagaacugguacagccugaagaagaacagcagaagccugggcgagaacgacgacggcaacaacgaggacaacgagaagcugagaaagcccaagcacaagaagcugaagcagcccgccgacggcaaccccgaccccaacgccaaccccaacguggaccccaacgccaaccccaacguggaccccaacgccaaccccaacguggaccccaacgccaaccccaacgccaaccccaacgccaaccccaacgccaaccccaacgccaaccccaacgccaaccccaacgccaaccccaacgccaaccccaacgccaaccccaacgccaaccccaacgccaaccccaacgccaaccccaacgccaaccccaacgccaaccccaacgccaaccccaacgccaaccccaacgccaaccccaacguggaccccaacgccaaccccaacgccaaccccaacgccaaccccaacgccaaccccaacgccaaccccaacgccaaccccaacgccaaccccaacgccaaccccaacgccaaccccaacgccaaccccaacgccaaccccaacgccaaccccaacgccaaccccaacgccaaccccaacgccaaccccaacgccaaccccaacgccaaccccaacgccaaccccgccgccuacgagcccagcgacaagcacaucaaggaguaccugaacaagauccagaacagccuggccgccuacaucaagcccggcagcgccaacaagcccaaggacgagcuggacuacgccaacgacaucgagaagaagaucugcaagauggagaagugcagcgccgccuacgccaaguucguggccgccuggacccugaaggccgccgccugaggacuagucccuguucccagagcccacuuuuuuuucuuuuuuugaaauaaaauagccugucuuucagaucucaaaggcucuuuucagagccaccaaaaaaaaaaaaaaaaaaaaaaaaaaaaaaaaaaaaaaaaaaaaaaaaaaaaaaaaaaaaaaaaagaauu

SEQ ID NO: 9226 - RNA, 1324 nt, Artificial Sequence
  mRNA Design a-1 (hSL-A64-N5) comprising derived and/or modified sequence from Pf(3D7)__XP_001351122.1__HsALB_Pf-CSP(19-272)_L(AAY)_Pf-CSP(310-3 27)_L(AAY)_Pf-CSP(346-375)_L(AAY)_PADRE_L(AAY)_P2 (opt4)
aggagagucccgcagucggcguccagcggcucugcuuguucgugugugugucguugcaggccuuauucaagcuuaccaugaagugggugaccuucaucagccugcuguuccuguucagcagcgccuacagccuguuccaggaguaccagugcuacggcagcagcagcaacaccagagugcugaacgagcugaacuacgacaacgccggcaccaaccuguacaacgagcuggagaugaacuacuacggcaagcaggagaacugguacagccugaagaagaacagcagaagccugggcgagaacgacgacggcaacaacgaggacaacgagaagcugagaaagcccaagcacaagaagcugaagcagcccgccgacggcaaccccgaccccaacgccaaccccaacguggaccccaacgccaaccccaacguggaccccaacgccaaccccaacguggaccccaacgccaaccccaacgccaaccccaacgccaaccccaacgccaaccccaacgccaaccccaacgccaaccccaacgccaaccccaacgccaaccccaacgccaaccccaacgccaaccccaacgccaaccccaacgccaaccccaacgccaaccccaacgccaaccccaacgccaaccccaacgccaaccccaacgccaaccccaacguggaccccaacgccaaccccaacgccaaccccaacgccaaccccaacgccaaccccaacgccaaccccaacgccaaccccaacgccaaccccaacgccaaccccaacgccaaccccaacgccaaccccaacgccaaccccaacgccaaccccaacgccaaccccaacgccaaccccaacgccaaccccaacgccaaccccaacgccaaccccaacgccaaccccgccgccuacgagcccagcgacaagcacaucaaggaguaccugaacaagauccagaacagccuggccgccuacaucaagcccggcagcgccaacaagcccaaggacgagcuggacuacgccaacgacaucgagaagaagaucugcaagauggagaagugcagcgccgccuacgccaaguucguggccgccuggacccugaaggccgccgccgccgccuaccaguacaucaaggccaacagcaaguucaucggcaucaccgagcugugaggacuagucccuguucccagagcccacuuuuuuuucuuuuuuugaaauaaaauagccugucuuucagaucucaaaggcucuuuucagagccaccaaaaaaaaaaaaaaaaaaaaaaaaaaaaaaaaaaaaaaaaaaaaaaaaaaaaaaaaaaaaaaaaagaauu

SEQ ID NO: 9227 - RNA, 1288 nt, Artificial Sequence
  mRNA Design a-1 (hSL-A64-N5) comprising derived and/or modified sequence from Pf(3D7)__XP_001351122.1__HsALB_Pf-CSP(19-272)_L(AAY)_Pf-CSP(310-3 27)_Linker (AAY)_Pf-CSP(346-397) (opt4)
aggagagucccgcagucggcguccagcggcucugcuuguucgugugugugucguugcaggccuuauucaagcuuaccaugaagugggugaccuucaucagccugcuguuccuguucagcagcgccuacagccuguuccaggaguaccagugcuacggcagcagcagcaacaccagagugcugaacgagcugaacuacgacaacgccggcaccaaccuguacaacgagcuggagaugaacuacuacggcaagcaggagaacugguacagccugaagaagaacagcagaagccugggcgagaacgacgacggcaacaacgaggacaacgagaagcugagaaagcccaagcacaagaagcugaagcagcccgccgacggcaaccccgaccccaacgccaaccccaacguggaccccaacgccaaccccaacguggaccccaacgccaaccccaacguggaccccaacgccaaccccaacgccaaccccaacgccaaccccaacgccaaccccaacgccaaccccaacgccaaccccaacgccaaccccaacgccaaccccaacgccaaccccaacgccaaccccaacgccaaccccaacgccaaccccaacgccaaccccaacgccaaccccaacgccaaccccaacgccaaccccaacgccaaccccaacguggaccccaacgccaaccccaacgccaaccccaacgccaaccccaacgccaaccccaacgccaaccccaacgccaaccccaacgccaaccccaacgccaaccccaacgccaaccccaacgccaaccccaacgccaaccccaacgccaaccccaacgccaaccccaacgccaaccccaacgccaaccccaacgccaaccccaacgccaaccccaacgccaaccccgccgccuacgagcccagcgacaagcacaucaaggaguaccugaacaagauccagaacagccuggccgccuacaucaagcccggcagcgccaacaagcccaaggacgagcuggacuacgccaacgacaucgagaagaagaucugcaagauggagaagugcagcagcguguucaacguggugaacagcagcaucggccugaucauggugcugagcuuccuguuccugaacugaggacuagucccuguucccagagcccacuuuuuuuucuuuuuuugaaauaaaauagccugucuuucagaucucaaaggcucuuuucagagccaccaaaaaaaaaaaaaaaaaaaaaaaaaaaaaaaaaaaaaaaaaaaaaaaaaaaaaaaaaaaaaaaaagaauu

SEQ ID NO: 9228 - RNA, 1888 nt, Artificial Sequence
  mRNA Design a-1 (hSL-A64-N5) comprising derived and/or modified sequence from Pf(3D7)__XP_001351122.1__LumSynt_L(GGS4-GGG)_Pf-CSP(19-397) (opt5)
aggagagucccgcagucggcguccagcggcucugcuuguucgugugugugucguugcaggccuuauucaagcuuaccaugcagaucuacgagggcaagcugaccgccgaagggcucagauucggaauuguggcuagccgguuuaaccacgcccuggucgaccgccuuguugagggcgcgaucgaugcuauugugagacaugggggacgggaagaggacaucacacuggugcgcguccccggcuccugggaaauuccuguggccgccggggagcucgcuagaaaagaggauaucgacgccguuaucgcuauuggagugcugauccggggcgccacgccgcacuucgauuauauugcgucugaagucagcaagggccuugccgaccugucccucgagcugcgcaaacccaucaccuuuggggugauuacagcugauacccuggaacaagccaucgagagagcuggaacaaagcauggcaauaaagggugggaggccgcgcucucugccauugaaauggcuaaccuguucaagagccuucggggaggcuccgggggaucuggcggcagcgggggauccggcgggggacuguuucaggaguaccagugcuauggcuccucuuccaauacccgcguucucaacgaacugaauuacgacaacgccgggacaaaucuuuauaacgagcuggaaaugaauuacuauggaaagcaggagaacugguacagccucaaaaagaacucuagaucccugggcgagaaugaugacggcaauaacgaagauaaugagaaacugcggaagccuaaacacaagaagcucaaacaacccgcugacgggaacccugaucccaacgccaauccuaacguggacccgaaugccaaccccaaugucgacccuaacgcuaaucccaacguggauccuaaugcgaaccccaaugccaacccgaaugcuaacccuaaugccaaccccaacgccaauccuaacgcuaaucccaacgccaaucccaacgcgaauccuaacgcuaauccgaacgccaaucccaacgccaauccuaacgcuaaucccaacgccaacccuaaugcuaaccccaaugccaacccgaaugcgaacccuaaugccaaccccaauguggacccuaacgcuaaucccaacgccaauccuaacgcuaaucccaacgccaacccgaaugcgaacccuaaugccaaccccaaugcuaaccccaaugccaacccuaaugcuaacccgaaugccaaccccaaugccaacccuaaugcuaaccccaaugcgaacccuaacgccaaucccaacgcuaauccuaacgccaaucccaacgccaauccgaacgcuaauccuaacaagaauaaccagggaaauggccaggggcauaacaugcccaaugauccuaaccgcaacgucgacgaaaaugccaacgcgaauagcgcuguuaaaaacaauaacaaugaggaacccucugauaagcacaucaaagaguaccugaacaagauccagaauagccuuagcaccgagugguccccguguucugugacgugcggaaacggcauucaagugagaaucaaaccugggagcgccaauaagcccaaggacgaacuggauuaugccaacgacauugagaaaaagaucuguaaaauggaaaagugcuccagcgucuucaaugugguuaacucuuccauuggccucaucauggugcugagcuuucuuuuccugaauugaggacuagucccuguucccagagcccacuuuuuuuucuuuuuuugaaauaaaauagccugucuuucagaucucaaaggcucuuuucagagccaccaaaaaaaaaaaaaaaaaaaaaaaaaaaaaaaaaaaaaaaaaaaaaaaaaaaaaaaaaaaaaaaaagaauu

SEQ ID NO: 9229 - RNA, 1750 nt, Artificial Sequence
  mRNA Design a-1 (hSL-A64-N5) comprising derived and/or modified sequence from Pf(3D7)__XP_001351122.1__HsALB_Pf-CSP(19-272)_L(PVTN)_HBsAg (opt5)
aggagagucccgcagucggcguccagcggcucugcuuguucgugugugugucguugcaggccuuauucaagcuuaccaugaagugggugaccuucaucagccugcucuuucuguucuccucugccuacagccuuuuucaggaguaucaaugcuacggcuccucuagcaacacaagaguccugaaugaacucaacuaugacaaugcugggacgaaccuguacaaugagcuugaaaugaacuauuacggaaaacaggagaauugguauucccugaagaaaaacucucggagccucggcgaaaaugaugacgggaacaaugaggauaacgagaagcugcgcaaacccaagcacaagaaacugaagcagccugccgacggaaauccggaucccaacgcgaauccuaacguugaccccaacgcuaauccuaacguggaucccaaugccaacccuaauguggacccgaacgccaaucccaacgcuaauccuaacgccaaucccaacgcuaauccuaacgccaaucccaacgcgaacccgaaugccaacccuaaugcuaaccccaaugccaacccuaaugcuaaccccaaugccaaccccaaugcgaacccuaaugccaacccgaaugcuaaccccaacgccaauccuaacgcuaaucccaacgccaauccuaacgucgaucccaaugccaacccgaaugcuaacccuaaugcgaaccccaaugccaacccuaaugcuaaccccaacgccaauccuaacgccaaucccaacgcuaauccgaacgccaauccuaacgcgaaucccaacgcuaaucccaacgccaauccuaacgccaauccgaacgcuaaucccaacgccaacccuaaugcuaaccccaaugccaacccuaaugcgaaucccccugugaccaacauggaaaacauuacauccggcuuccucgggccccugcuuguucugcaggccggauuuuuccuccugaccagaauccuuacaauuccgcaaagccuggacucuugguggaccucccucaauuuucugggcggcagcccugugugucuggggcagaacucucagucccccacaagcaaucauucuccuaccuccugucccccgaucugcccuggauaccgguggaugugccuccgcagauucauuaucuuucuguucauccuucugcucugucugauuuuucuucugguccuccuggauuaccagggcaugcugcccgugugcccucucauccccgggagcacgaccacaaacaccggacccuguaaaacaugcaccacgccugcucaaggcaauuccauguucccgucuuguugcuguacaaagcccaccgacgggaacugcacaugcauuccuauccccagcuccugggccuuugcuaaauaucugugggagugggccagcguucgguucucuuggcuuucccugcucgugccuuucguccagugguuugugggacugagccccaccguguggcuuucugcgauuuggaugaugugguacuggggcccuagccuguauuccaucgucucuccguucauuccccuccugccuaucuuuuucugucuguggguuuacaucugaggacuagucccuguucccagagcccacuuuuuuuucuuuuuuugaaauaaaauagccugucuuucagaucucaaaggcucuuuucagagccaccaaaaaaaaaaaaaaaaaaaaaaaaaaaaaaaaaaaaaaaaaaaaaaaaaaaaaaaaaaaaaaaaagaauu

SEQ ID NO: 9230 - RNA, 1867 nt, Artificial Sequence
  mRNA Design a-1 (hSL-A64-N5) comprising derived and/or modified sequence from Pf(3D7)__XP_001351122.1__HsALB_Pf-CSP(19-272)_L(AAY)_Pf-CSP(346-3 65)_L(AAY)_PADRE_L(PVTN)_HBsAg (opt5)
aggagagucccgcagucggcguccagcggcucugcuuguucgugugugugucguugcaggccuuauucaagcuuaccaugaagugggugaccuucaucagccugcucuuucuguucuccucugccuacagccuuuuucaggaguaucaaugcuacggcuccucuagcaacacaagaguccugaaugaacucaacuaugacaaugcugggacgaaccuguacaaugagcuugaaaugaacuauuacggaaaacaggagaauugguauucccugaagaaaaacucucggagccucggcgaaaaugaugacgggaacaaugaggauaacgagaagcugcgcaaacccaagcacaagaaacugaagcagccugccgacggaaauccggaucccaacgcgaauccuaacguugaccccaacgcuaauccuaacguggaucccaaugccaacccuaauguggacccgaacgccaaucccaacgcuaauccuaacgccaaucccaacgcuaauccuaacgccaaucccaacgcgaacccgaaugccaacccuaaugcuaaccccaaugccaacccuaaugcuaaccccaaugccaaccccaaugcgaacccuaaugccaacccgaaugcuaaccccaacgccaauccuaacgcuaaucccaacgccaauccuaacgucgaucccaaugccaacccgaaugcuaacccuaaugcgaaccccaaugccaacccuaaugcuaaccccaacgccaauccuaacgccaaucccaacgcuaauccgaacgccaauccuaacgcgaaucccaacgcuaaucccaacgccaauccuaacgccaauccgaacgcuaaucccaacgccaacccuaaugcuaaccccaaugccaacccuaaugcgaaccccgccgcuuacauuaaaccuggcuccgccaauaagcccaaagacgaacucgauuacgcuaacgacaucgaggccgcguaugccaaguucguggcugccuggacccugaaggcugccgccccgguuacaaauauggaaaacauuaccagcggguuucuuggaccucugcucgugcugcaggcuggcuucuuucuucugacaagaauccucaccauuccccaaucucuggauuccugguggacaagccugaauuuccucggcgggucuccugucugucugggacagaacucccagagccccaccucuaaucauuccccgacgagcugcccucccaucuguccuggcuaccgguggaugugccuucgcagauuuaucauuuuccuguuuauccuccugcuuugucugauuuuccuccuggugcugcucgacuaucaggggaugcugcccguuugcccccuuaucccuggauccaccacaaccaacacaggcccguguaaaaccugcacgacacccgcgcaaggaaauucuauguuuccuagcuguugcuguaccaagcccacagacgggaacuguaccugcauuccuauccccuccagcugggccuucgcuaaauaccugugggagugggccucugugcgguucuccuggcucagccugcuugucccuuuugugcagugguucgugggccugucuccgaccgucuggcucagcgccauuuggaugaugugguauuggggccccucccuguacucuaucguuagcccuuuuaucccccugcucccuauuuucuuuugccuguggguguauaucugaggacuagucccuguucccagagcccacuuuuuuuucuuuuuuugaaauaaaauagccugucuuucagaucucaaaggcucuuuucagagccaccaaaaaaaaaaaaaaaaaaaaaaaaaaaaaaaaaaaaaaaaaaaaaaaaaaaaaaaaaaaaaaaaagaauu

SEQ ID NO: 9231 - RNA, 2086 nt, Artificial Sequence
  mRNA Design a-1 (hSL-A64-N5) comprising derived and/or modified sequence from Pf(3D7)__XP_001351122.1__HsALB_Pf-CSP(19-384)_L(PVTN)_HBsAg (opt5)
aggagagucccgcagucggcguccagcggcucugcuuguucgugugugugucguugcaggccuuauucaagcuuaccaugaagugggugaccuucaucagccugcucuuucuguucuccucugccuacagccuuuuucaggaguaucaaugcuacggcuccucuagcaacacaagaguccugaaugaacucaacuaugacaaugcugggacgaaccuguacaaugagcuugaaaugaacuauuacggaaaacaggagaauugguauucccugaagaaaaacucucggagccucggcgaaaaugaugacgggaacaaugaggauaacgagaagcugcgcaaacccaagcacaagaaacugaagcagccugccgacggaaauccggaucccaacgcgaauccuaacguugaccccaacgcuaauccuaacguggaucccaaugccaacccuaauguggacccgaacgccaaucccaacgcuaauccuaacgccaaucccaacgcuaauccuaacgccaaucccaacgcgaacccgaaugccaacccuaaugcuaaccccaaugccaacccuaaugcuaaccccaaugccaaccccaaugcgaacccuaaugccaacccgaaugcuaaccccaacgccaauccuaacgcuaaucccaacgccaauccuaacgucgaucccaaugccaacccgaaugcuaacccuaaugcgaaccccaaugccaacccuaaugcuaaccccaacgccaauccuaacgccaaucccaacgcuaauccgaacgccaauccuaacgcgaaucccaacgcuaaucccaacgccaauccuaacgccaauccgaacgcuaaucccaacgccaacccuaaugcuaaccccaaugccaacccuaaugcgaaccccaauaaaaacaaucagggcaacgggcaaggacauaauaugccuaacgaccccaauagaaacguggaugaaaaugccaacgcuaacuccgccguuaagaauaacaauaacgaggaaccgagcgacaaacacauuaaggaguaccucaauaagauccagaacucucuguccaccgaguggagcccuuguucugugacaugcggcaauggcauucagguccggaucaaacccggguccgcuaacaagccuaaagaugaacuugacuacgccaaugacauugagaagaaaaucuguaagauggaaaaaugcagcucuguguucaacguugucaauuccagccccgugaccaacauggagaauaucacauccggauuucugggcccgcuccuggugcuucaggcgggguucuuucugcucacccgcauucugacaaucccucaaucucuggauagcugguggaccucccucaacuuccugggaggcagccccgugugucuugggcaaaauucucaguccccuacgagcaaccauucucccaccagcugucccccuauuugcccgggauauagauggaugugccugcggcgcuuuaucauuuuccucuuuauccugcuucugugucucauuuuccugcugguccuccuggacuaccagggcaugcuucccguuugcccucugauccccggcuccacaaccacaaacaccgggccuuguaagacgugcacaacccccgcccagggaaauucuauguuuccuagcugcuguugcacaaagccgaccgauggcaacuguaccugcauccccauuccuuccagcugggcuuucgccaaauaucucugggaaugggcuucugugagauucuccuggcugagccuucuggugcccuuuguccagugguucguggggcucucuccuacaguuuggcuguccgccaucuggaugaugugguacuggggacccagccuguauuccauugugucuccguuuaucccucuccugcccauuuucuuuugucuuugggucuacaucugaggacuagucccuguucccagagcccacuuuuuuuucuuuuuuugaaauaaaauagccugucuuucagaucucaaaggcucuuuucagagccaccaaaaaaaaaaaaaaaaaaaaaaaaaaaaaaaaaaaaaaaaaaaaaaaaaaaaaaaaaaaaaaaaagaauu

SEQ ID NO: 9232 - RNA, 1903 nt, Artificial Sequence
  mRNA Design a-1 (hSL-A64-N5) comprising derived and/or modified sequence from Pf(3D7)__XP_001351122.1__HsALB_Pf-CSP(19-384)_L(SGG)_Ferritin (opt5)
aggagagucccgcagucggcguccagcggcucugcuuguucgugugugugucguugcaggccuuauucaagcuuaccaugaagugggugaccuucaucagccugcucuuucuguucuccucugccuacagccuuuuucaggaguaucaaugcuacggcuccucuagcaacacaagagugcugaaugaacucaacuaugacaaugcugggacgaaccuguacaaugagcuugaaaugaacuauuacggaaaacaggagaauugguauucccugaagaaaaacucucggagccucggcgaaaaugaugacgggaacaaugaggauaacgagaagcugcgcaaacccaagcacaagaaacugaagcagccugccgacggaaauccggaucccaacgcgaauccuaacguugaccccaacgcuaauccuaacguggaucccaaugccaacccuaauguggacccgaacgccaaucccaacgcuaauccuaacgccaaucccaacgcuaauccuaacgccaaucccaacgcgaacccgaaugccaacccuaaugcuaaccccaaugccaacccuaaugcuaaccccaaugccaaccccaaugcgaacccuaaugccaacccgaaugcuaaccccaacgccaauccuaacgcuaaucccaacgccaauccuaacgucgaucccaaugccaacccgaaugcuaacccuaaugcgaaccccaaugccaacccuaaugcuaaccccaacgccaauccuaacgccaaucccaacgcuaauccgaacgccaauccuaacgcgaaucccaacgcuaaucccaacgccaauccuaacgccaauccgaacgcuaaucccaacgccaacccuaaugcuaaccccaaugccaacccuaaugcgaaccccaauaaaaacaaucagggcaacgggcaaggacauaauaugccuaacgaccccaauagaaacguggaugaaaaugccaacgcuaacuccgccguuaagaauaacaauaacgaggaaccgagcgacaaacacauuaaggaguaccucaauaagauccagaacucucuguccaccgaguggagcccuuguucugugacaugcggcaauggcauucagguccggaucaaacccggguccgcuaacaagccuaaagaugaacuugacuacgccaaugacauugagaagaaaaucuguaagauggaaaaaugcagcucuguguucaacguugugaacuccagcuccggaggccugucuaaggauaucauuaagcuccugaaugagcaggucaauaaagaaaugaacagcuccaaucuuuauaugagcaugucuuccugguguuacacccauagccuggacggggcgggacucuuucuguucgaucacgccgcugaggaguaugaacaugccaagaaacugaucauuuuucucaacgagaacaaugugcccgugcaacugacaucuaucagcgcuccggaacacaaguucgagggccuuacccagauuuuucagaaagccuacgaacacgagcagcauaucuccgagucuauuaacaauaucgucgaccacgccaucaagagcaaggaucaugcuacauucaacuuucugcaaugguauguugcggaacagcacgaggaagagguccucuucaaagacauucuggauaagaucgaacuuauugggaaugagaaccacggacuguaccucgccgaccaguaugugaaaggcaucgcuaagucccgcaaaagcugaggacuagucccuguucccagagcccacuuuuuuuucuuuuuuugaaauaaaauagccugucuuucagaucucaaaggcucuuuucagagccaccaaaaaaaaaaaaaaaaaaaaaaaaaaaaaaaaaaaaaaaaaaaaaaaaaaaaaaaaaaaaaaaaagaauu

SEQ ID NO: 9233 - RNA, 1864 nt, Artificial Sequence
  mRNA Design a-1 (hSL-A64-N5) comprising derived and/or modified sequence from Pf(3D7)__XP_001351122.1__HsALB_Pf-CSP(93-384)_L(PVTN)_HBsAg (opt5)
aggagagucccgcagucggcguccagcggcucugcuuguucgugugugugucguugcaggccuuauucaagcuuaccaugaagugggugaccuucaucagccugcucuuucuguucuccucugccuacagcaaacuuaagcagcccgcugacggcaacccugauccgaaugccaaccccaaugucgacccuaacgcgaaucccaacguugauccuaaugcuaaccccaauguggacccuaacgccaauccgaacgccaaucccaacgcuaauccuaacgccaaccccaaugcuaacccuaaugccaaccccaaugcgaacccgaaugccaacccuaaugcuaaccccaaugccaacccuaaugcuaaccccaaugccaaccccaacgcgaauccuaacgccaauccgaacgcuaaucccaacgccaauccuaacgcuaaucccaacguggauccuaaugccaaccccaaugccaacccgaaugcuaacccuaacgcgaaucccaacgccaauccuaacgcuaaucccaacgccaauccuaacgccaaucccaacgcuaauccgaacgccaauccuaacgcgaaucccaacgcuaaccccaaugccaacccuaaugccaacccgaaugcuaaccccaaugccaacccuaaugcuaaccccaaugccaacccuaauaaaaacaaucaagggaacggacagggccacaauaugcccaacgacccuaacagaaaugucgaugagaacgcgaaugccaacuccgcugugaagaauaacaauaacgaggaacccucugacaaacauauuaaggaauaucugaauaagauccagaacagccucuccacagaguggucuccgugcagcguuacgugugggaaugggauucaggugcggaucaaaccuggcuccgccaacaagcccaaagaugaacuggacuacgcuaaugauauugagaagaaaaucugcaagauggagaaguguagcucugucuuuaacgugguuaauuccagcccugugaccaacauggaaaacaucacaucuggguuccuuggaccccugcucguccugcaagccggcuuuuuccugcucacccgcauucugacaaucccgcagucccuugacagcugguggaccucucugaauuuucucggcggguccccugugugccugggacagaacagccagucccccacaucuaaucacagcccuaccuccuguccucccauuugccccggcuauagauggaugugucuucggcgcuucaucauuuuucuguucauccuccugcugugccucauuuuucugcuugugcugcucgauuaccaagggaugcugccggucuguccccuuaucccuggaagcacgaccacaaacaccggccccugcaaaacauguaccacgccugcgcagggaaauucuauguuccccuccugcugcuguacaaagccuaccgacggaaacugcacauguaucccgauucccagcucuugggccuuugcuaaauaucugugggagugggccagcguuagauucuccuggcucucucugcuggugccuuucgugcagugguuugucggccucagccccaccguguggcuguccgcuaucuggaugaugugguacuggggcccuagccuuuauucuauuguuucccccuucaucccgcugcucccuaucuuuuucugccuguggguguacauuugaggacuagucccuguucccagagcccacuuuuuuuucuuuuuuugaaauaaaauagccugucuuucagaucucaaaggcucuuuucagagccaccaaaaaaaaaaaaaaaaaaaaaaaaaaaaaaaaaaaaaaaaaaaaaaaaaaaaaaaaaaaaaaaaagaauu

SEQ ID NO: 9234 - RNA, 1525 nt, Artificial Sequence; identical to SEQ ID NO: 6737
  mRNA Design a-1 (hSL-A64-N5) comprising derived and/or modified sequence from Pf(3D7)__XP_001351122.1__HsALB_Pf-CSP(199-377)_L(PVTN)_HBsAg (opt5)

SEQ ID NO: 9235 - RNA, 1222 nt, Artificial Sequence
  mRNA Design a-1 (hSL-A64-N5) comprising derived and/or modified sequence from Pf(3D7)__XP_001351122.1__HsALB_Pf-CSP(19-272)_L(AAY)_Pf-CSP(346-3 75)_L(AAY)_Pf-CSP(310-327) (opt5)
aggagagucccgcagucggcguccagcggcucugcuuguucgugugugugucguugcaggccuuauucaagcuuaccaugaagugggugaccuucaucagccugcucuuucuguucuccucugccuacagccuuuuucaggaguaucaaugcuacggcuccucuagcaacacaagaguccugaaugaacucaacuaugacaaugcugggacgaaccuguacaaugagcuugaaaugaacuauuacggaaaacaggagaauugguauucccugaagaaaaacucucggagccucggcgaaaaugaugacgggaacaaugaggauaacgagaagcugcgcaaacccaagcacaagaaacugaagcagccugccgacggaaauccggaucccaacgcgaauccuaacguugaccccaacgcuaauccuaacguggaucccaaugccaacccuaauguggacccgaacgccaaucccaacgcuaauccuaacgccaaucccaacgcuaauccuaacgccaaucccaacgcgaacccgaaugccaacccuaaugcuaaccccaaugccaacccuaaugcuaaccccaaugccaaccccaaugcgaacccuaaugccaacccgaaugcuaaccccaacgccaauccuaacgcuaaucccaacgccaauccuaacgucgaucccaaugccaacccgaaugcuaacccuaaugcgaaccccaaugccaacccuaaugcuaaccccaacgccaauccuaacgccaaucccaacgcuaauccgaacgccaauccuaacgcgaaucccaacgcuaaucccaacgccaauccuaacgccaauccgaacgcuaaucccaacgccaacccuaaugcuaaccccaaugccaacccuaaugcgaaccccgccgcuuacauuaaaccuggcuccgccaauaagcccaaagacgaacucgauuacgcuaacgacaucgagaagaagauuuguaaaauggaaaagugcagcgccgcguaugagccgucugauaaacauaucaaggaguaccugaauaaaauucagaacucccuuugaggacuagucccuguucccagagcccacuuuuuuuucuuuuuuugaaauaaaauagccugucuuucagaucucaaaggcucuuuucagagccaccaaaaaaaaaaaaaaaaaaaaaaaaaaaaaaaaaaaaaaaaaaaaaaaaaaaaaaaaaaaaaaaaagaauu

SEQ ID NO: 9236 - RNA, 1270 nt, Artificial Sequence
  mRNA Design a-1 (hSL-A64-N5) comprising derived and/or modified sequence from Pf(3D7)__XP_001351122.1__HsALB_Pf-CSP(19-272)_L(AAY)_Pf-CSP(346-3 75)_L(AAY)_Pf-CSP(310-327)_L(AAY)_PADRE (opt5)
aggagagucccgcagucggcguccagcggcucugcuuguucgugugugugucguugcaggccuuauucaagcuuaccaugaagugggugaccuucaucagccugcucuuucuguucuccucugccuacagccuuuuucaggaguaucaaugcuacggcuccucuagcaacacaagaguccugaaugaacucaacuaugacaaugcugggacgaaccuguacaaugagcuugaaaugaacuauuacggaaaacaggagaauugguauucccugaagaaaaacucucggagccucggcgaaaaugaugacgggaacaaugaggauaacgagaagcugcgcaaacccaagcacaagaaacugaagcagccugccgacggaaauccggaucccaacgcgaauccuaacguugaccccaacgcuaauccuaacguggaucccaaugccaacccuaauguggacccgaacgccaaucccaacgcuaauccuaacgccaaucccaacgcuaauccuaacgccaaucccaacgcgaacccgaaugccaacccuaaugcuaaccccaaugccaacccuaaugcuaaccccaaugccaaccccaaugcgaacccuaaugccaacccgaaugcuaaccccaacgccaauccuaacgcuaaucccaacgccaauccuaacgucgaucccaaugccaacccgaaugcuaacccuaaugcgaaccccaaugccaacccuaaugcuaaccccaacgccaauccuaacgccaaucccaacgcuaauccgaacgccaauccuaacgcgaaucccaacgcuaaucccaacgccaauccuaacgccaauccgaacgcuaaucccaacgccaacccuaaugcuaaccccaaugccaacccuaaugcgaaccccgccgcuuacauuaaaccuggcuccgccaauaagcccaaagacgaacucgauuacgcuaacgacaucgagaagaagauuuguaaaauggaaaagugcagcgccgcguaugagccgucugauaaacauaucaaggaguaccugaauaaaauucagaacucccuugccgcuuaugccaaguucguggcugccuggacccugaaagccgcugcgugaggacuagucccuguucccagagcccacuuuuuuuucuuuuuuugaaauaaaauagccugucuuucagaucucaaaggcucuuuucagagccaccaaaaaaaaaaaaaaaaaaaaaaaaaaaaaaaaaaaaaaaaaaaaaaaaaaaaaaaaaaaaaaaaagaauu

SEQ ID NO: 9237 - RNA, 1270 nt, Artificial Sequence
  mRNA Design a-1 (hSL-A64-N5) comprising derived and/or modified sequence from Pf(3D7)__XP_001351122.1__HsALB_Pf-CSP(19-272)_L(AAY)_Pf-CSP(310-3 27)_L(AAY)_Pf-CSP(346-375)_L(AAY)_PADRE (opt5)
aggagagucccgcagucggcguccagcggcucugcuuguucgugugugugucguugcaggccuuauucaagcuuaccaugaagugggugaccuucaucagccugcucuuucuguucuccucugccuacagccuuuuucaggaguaucaaugcuacggcuccucuagcaacacaagaguccugaaugaacucaacuaugacaaugcugggacgaaccuguacaaugagcuugaaaugaacuauuacggaaaacaggagaauugguauucccugaagaaaaacucucggagccucggcgaaaaugaugacgggaacaaugaggauaacgagaagcugcgcaaacccaagcacaagaaacugaagcagccugccgacggaaauccggaucccaacgcgaauccuaacguugaccccaacgcuaauccuaacguggaucccaaugccaacccuaauguggacccgaacgccaaucccaacgcuaauccuaacgccaaucccaacgcuaauccuaacgccaaucccaacgcgaacccgaaugccaacccuaaugcuaaccccaaugccaacccuaaugcuaaccccaaugccaaccccaaugcgaacccuaaugccaacccgaaugcuaaccccaacgccaauccuaacgcuaaucccaacgccaauccuaacgucgaucccaaugccaacccgaaugcuaacccuaaugcgaaccccaaugccaacccuaaugcuaaccccaacgccaauccuaacgccaaucccaacgcuaauccgaacgccaauccuaacgcgaaucccaacgcuaaucccaacgccaauccuaacgccaauccgaacgcuaaucccaacgccaacccuaaugcuaaccccaaugccaacccuaaugcgaaccccgccgcuuacgaaccuuccgacaaacauauuaaggaguaccucaauaaaauccagaacagccuggccgcuuauauuaagcccggcucugccaauaagccgaaagaugaacuugacuacgcgaacgauaucgagaagaaaauuuguaagauggagaaaugcuccgccgcuuaugccaaguucguggcugccuggacccugaaagccgcugcgugaggacuagucccuguucccagagcccacuuuuuuuucuuuuuuugaaauaaaauagccugucuuucagaucucaaaggcucuuuucagagccaccaaaaaaaaaaaaaaaaaaaaaaaaaaaaaaaaaaaaaaaaaaaaaaaaaaaaaaaaaaaaaaaaagaauu

SEQ ID NO: 9238 - RNA, 1324 nt, Artificial Sequence
  mRNA Design a-1 (hSL-A64-N5) comprising derived and/or modified sequence from Pf(3D7)__XP_001351122.1__HsALB_Pf-CSP(19-272)_L(AAY)_Pf-CSP(310-3 27)_L(AAY)_Pf-CSP(346-375)_L(AAY)_PADRE_L(AAY)_P2 (opt5)
aggagagucccgcagucggcguccagcggcucugcuuguucgugugugugucguugcaggccuuauucaagcuuaccaugaagugggugaccuucaucagccugcucuuucuguucuccucugccuacagccuuuuucaggaguaucaaugcuacggcuccucuagcaacacaagaguccugaaugaacucaacuaugacaaugcugggacgaaccuguacaaugagcuugaaaugaacuauuacggaaaacaggagaauugguauucccugaagaaaaacucucggagccucggcgaaaaugaugacgggaacaaugaggauaacgagaagcugcgcaaacccaagcacaagaaacugaagcagccugccgacggaaauccggaucccaacgcgaauccuaacguugaccccaacgcuaauccuaacguggaucccaaugccaacccuaauguggacccgaacgccaaucccaacgcuaauccuaacgccaaucccaacgcuaauccuaacgccaaucccaacgcgaacccgaaugccaacccuaaugcuaaccccaaugccaacccuaaugcuaaccccaaugccaaccccaaugcgaacccuaaugccaacccgaaugcuaaccccaacgccaauccuaacgcuaaucccaacgccaauccuaacgucgaucccaaugccaacccgaaugcuaacccuaaugcgaaccccaaugccaacccuaaugcuaaccccaacgccaauccuaacgccaaucccaacgcuaauccgaacgccaauccuaacgcgaaucccaacgcuaaucccaacgccaauccuaacgccaauccgaacgcuaaucccaacgccaacccuaaugcuaaccccaaugccaacccuaaugcgaaccccgccgcuuacgaaccuuccgacaaacauauuaaggaguaccucaauaaaauccagaacagccuggccgcuuauauuaagcccggcucugccaauaagccgaaagaugaacuugacuacgcgaacgauaucgagaagaaaauuuguaagauggagaaaugcuccgccgcuuaugccaaguucguggcugccuggacccugaaagccgcugcggccgcuuaccaauauaucaaggccaauagcaaguuuaucgggauuacagaacucugaggacuagucccuguucccagagcccacuuuuuuuucuuuuuuugaaauaaaauagccugucuuucagaucucaaaggcucuuuucagagccaccaaaaaaaaaaaaaaaaaaaaaaaaaaaaaaaaaaaaaaaaaaaaaaaaaaaaaaaaaaaaaaaaagaauu

SEQ ID NO: 9239 - RNA, 1288 nt, Artificial Sequence
  mRNA Design a-1 (hSL-A64-N5) comprising derived and/or modified sequence from Pf(3D7)__XP_001351122.1__HsALB_Pf-CSP(19-272)_L(AAY)_Pf-CSP(310-3 27)_Linker (AAY)_Pf-CSP(346-397) (opt5)
aggagagucccgcagucggcguccagcggcucugcuuguucgugugugugucguugcaggccuuauucaagcuuaccaugaagugggugaccuucaucagccugcucuuucuguucuccucugccuacagccuuuuucaggaguaucaaugcuacggcuccucuagcaacacaagaguccugaaugaacucaacuaugacaaugcugggacgaaccuguacaaugagcuugaaaugaacuauuacggaaaacaggagaauugguauucccugaagaaaaacucucggagccucggcgaaaaugaugacgggaacaaugaggauaacgagaagcugcgcaaacccaagcacaagaaacugaagcagccugccgacggaaauccggaucccaacgcgaauccuaacguugaccccaacgcuaauccuaacguggaucccaaugccaacccuaauguggacccgaacgccaaucccaacgcuaauccuaacgccaaucccaacgcuaauccuaacgccaaucccaacgcgaacccgaaugccaacccuaaugcuaaccccaaugccaacccuaaugcuaaccccaaugccaaccccaaugcgaacccuaaugccaacccgaaugcuaaccccaacgccaauccuaacgcuaaucccaacgccaauccuaacgucgaucccaaugccaacccgaaugcuaacccuaaugcgaaccccaaugccaacccuaaugcuaaccccaacgccaauccuaacgccaaucccaacgcuaauccgaacgccaauccuaacgcgaaucccaacgcuaaucccaacgccaauccuaacgccaauccgaacgcuaaucccaacgccaacccuaaugcuaaccccaaugccaacccuaaugcgaaccccgccgcuuacgaaccuuccgacaaacauauuaaggaguaccucaauaaaauccagaacagccuggccgcuuauauuaagcccggcucugccaauaagccgaaagaugaacuugacuacgcgaacgauaucgagaagaaaauuuguaagauggagaaaugcuccagcguguucaauguugugaacucuuccaucgggcugaucaugguccucagcuuucuguuccuuaauugaggacuagucccuguucccagagcccacuuuuuuuucuuuuuuugaaauaaaauagccugucuuucagaucucaaaggcucuuuucagagccaccaaaaaaaaaaaaaaaaaaaaaaaaaaaaaaaaaaaaaaaaaaaaaaaaaaaaaaaaaaaaaaaaagaauu

SEQ ID NO: 9240 - RNA, 1888 nt, Artificial Sequence
  mRNA Design a-1 (hSL-A64-N5) comprising derived and/or modified sequence from Pf(3D7)__XP_001351122.1__LumSynt_L(GGS4-GGG)_Pf-CSP(19-397) (opt6)
aggagagucccgcagucggcguccagcggcucugcuuguucgugugugugucguugcaggccuuauucaagcuuaccaugcaaauauacgaaggaaaacuaacagcagaaggauuacgauucggcauaguagcaucaagguucaaccacgcauuaguagauagacuaguagaaggagcaauagacgcaauaguccgacauggaggacgagaagaagauauaacacuagucagaguaccagggagcugggaaaucccaguagcagcaggagaacucgcaagaaaagaagauaucgacgccguaaucgcaaucgggguacuaauaagaggcgcaacaccccauuucgacuacauagcaagcgaaguaucaaaaggauuagcagaccuaaguuuagaacuaagaaaaccuauuacauucggcgucauaacggcagacacauuagaacaagccaucgaaagagcaggaacaaaacacggaaacaaaggcugggaagcagcacuaagcgcaauugaaauggcaaauuuauucaaaucccuaagaggcggcucagguggcaguggaggaucaggaggaucaggaggaggccuauuccaagaauaucaaugcuacggaucgagcucgaauacacgcguauuaaacgaauuaaacuacgacaacgcaggaacaaaccuauacaacgaacuagaaaugaacuauuauggaaaacaagagaacugguacucccuaaaaaaaaacagucgaagcuuaggagaaaaugacgacggaaauaacgaagacaacgaaaaacuaagaaaacccaaacauaaaaaauuaaaacaacccgcugacggaaacccagacccaaacgcuaacccgaacguugauccaaaugcaaacccaaauguggauccaaaugcaaaccccaacguagauccaaaugcaaacccaaacgcaaaccccaaugccaacccaaacgccaacccuaaugcuaauccaaacgcaaacccaaacgcaaacccgaacgcaaauccaaacgcaaacccuaaugcuaacccaaaugcaaauccaaacgcaaacccaaacgcuaacccaaacgcaaacccaaaugcaaacccaaaugcaaacccaaacgcaaauccaaacguagacccaaacgcaaauccaaacgcaaauccaaacgcaaacccaaacgccaaccccaaugcaaauccgaacgcaaacccaaacgcaaacccaaacgcaaacccaaacgcaaacccaaaugccaacccaaacgcaaacccgaacgcaaacccaaacgcaaacccaaacgcaaacccuaaugcgaacccaaaugccaacccaaacgcaaaccccaacgcuaacccaaacaaaaacaaucaaggaaacggacaagggcacaacaugccaaacgauccaaacagaaaugucgacgaaaacgccaaugcaaacagugccguaaaaaauaauaacaacgaagaaccuucagacaaacacauaaaagaauacuuaaacaaaauacaaaacucauuaucaaccgaauggagcccauguucuguuacaugcggaaauggaauacaaguaagaauaaaaccaggaucagcaaacaaaccaaaagacgaauuagacuacgcaaaugauauagaaaaaaaaauaugcaagauggaaaaaugcaguucuguauuuaacguaguaaacagcucaauaggucuaauaaugguacuauccuuucuuuuccugaacuaaggacuagucccuguucccagagcccacuuuuuuuucuuuuuuugaaauaaaauagccugucuuucagaucucaaaggcucuuuucagagccaccaaaaaaaaaaaaaaaaaaaaaaaaaaaaaaaaaaaaaaaaaaaaaaaaaaaaaaaaaaaaaaaaagaauu

SEQ ID NO: 9241 - RNA, 1750 nt, Artificial Sequence
  mRNA Design a-1 (hSL-A64-N5) comprising derived and/or modified sequence from Pf(3D7)__XP_001351122.1__HsALB_Pf-CSP(19-272)_L(PVTN)_HBsAg (opt6)
aggagagucccgcagucggcguccagcggcucugcuuguucgugugugugucguugcaggccuuauucaagcuuaccaugaaauggguaaccuucaucucacuauuauucuuauuuucaucugcauacucacucuuccaagaauaccaaugcuacgguucaucuucuaacacaagaguacuaaacgaacuaaacuacgacaacgcaggaacaaaccucuauaacgaacuugaaaugaacuacuauggaaaacaagaaaacugguauucccuaaaaaaaaacucaagauccuuaggagaaaacgacgacggaaauaacgaagacaacgaaaaacuaagaaaaccaaaacacaaaaaacuaaaacaacccgcagacggaaacccagacccaaacgcaaacccaaacguagacccaaacgcaaacccaaacgucgacccaaacgccaauccaaacguagacccaaacgcuaacccaaacgccaauccaaacgcaaauccaaaugccaacccaaacgcaaacccaaaugcgaauccaaaugcaaaccccaaugcaaacccaaacgcaaauccaaacgcaaacccaaacgcaaacccuaacgcaaauccaaaugcaaacccuaacgcaaacccaaacgcaaauccaaacgcaaacccaaaugcaaauccaaacgucgacccaaacgcaaacccgaacgcaaacccaaacgcaaacccaaaugcaaauccaaaugcaaaccccaaugcaaacccaaacgcaaacccaaacgcuaacccaaaugcaaacccaaacgcaaacccaaacgcaaauccaaacgcaaacccaaacgcaaacccaaaugcaaacccaaacgcaaaccccaaugcaaauccaaacgcaaacccaaacgcaaacccacccguaaccaacauggaaaacaucacaucaggauuccuuggaccccucuuaguacuucaagcaggauucuuccuauuaacaagaauacuaacaauaccucaaucuuuagauucaugguggacuucauuaaauuuccuaggaggaagcccaguaugcuuaggacaaaacagccaaucaccaaccucaaaccacucaccaaccucaugcccaccaauaugcccaggauaccgauggaugugccuaagaagauucauaauauucuuauucauacuacuacuaugccucauauucuuacuaguacuauuagacuaccaaggaaugcugccagucugcccacuuauaccagguagcaccaccacuaacacaggaccuugcaaaacaugcacaacacccgcucaaggaaauucuauguuuccaucaugcugcugcacuaaacccacagauggcaauuguacaugcauaccaauccccucaucaugggcauuugccaaauacuuaugggaaugggcaucuguaagauucucuuggcuaucacucuuaguaccauucguacaaugguucguaggccuauccccuacaguauggcuauccgcaauauggaugaugugguacuggggaccaucacuauacucaauagucucacccuucauaccacuauuaccaauauucuucugccuauggguauauauauaaggacuagucccuguucccagagcccacuuuuuuuucuuuuuuugaaauaaaauagccugucuuucagaucucaaaggcucuuuucagagccaccaaaaaaaaaaaaaaaaaaaaaaaaaaaaaaaaaaaaaaaaaaaaaaaaaaaaaaaaaaaaaaaaagaauu

SEQ ID NO: 9242 - RNA, 1867 nt, Artificial Sequence
  mRNA Design a-1 (hSL-A64-N5) comprising derived and/or modified sequence from Pf(3D7)__XP_001351122.1__HsALB_Pf-CSP(19-272)_L(AAY)_Pf-CSP(346-3 65)_L(AAY)_PADRE_L(PVTN)_HBsAg (opt6)
aggagagucccgcagucggcguccagcggcucugcuuguucgugugugugucguugcaggccuuauucaagcuuaccaugaaaugggucaccuucauuuccuuauuauucuuauuuucguccgcauacucacuauuucaagaauaucaauguuacggaucaagcucaaacacccgcguacucaacgaacuaaacuacgacaacgcaggaacaaaccuauauaacgaacuagaaaugaauuauuacggaaaacaagaaaacugguauucacuuaaaaaaaacuccagaucccuuggcgaaaacgacgacggaaauaaugaagacaacgaaaaacuuagaaaaccaaaacauaaaaaacuaaaacaaccugcagacgguaacccagauccaaaugcuaacccaaauguagacccuaacgcuaacccaaacguagauccaaacgccaacccaaacguagauccaaacgcaaacccaaacgcaaauccaaaugcaaacccaaacgccaaccccaacgcaaacccaaaugcaaauccuaaugcaaaucccaacgcaaauccaaacgcaaauccaaaugcaaaccccaacgcaaacccaaaugcaaauccaaaugcaaauccaaaugcaaacccaaacgcaaacccaaaugcaaauccuaacgcaaacccaaacgucgaccccaacgcaaauccaaacgcaaacccaaacgcaaaccccaaugcaaacccaaaugcaaacccaaacgcaaacccaaacgcaaaccccaacgcaaauccaaacgcaaauccaaaugcaaauccaaacgcaaaccccaaugcaaaccccaaugcuaacccaaacgccaaucccaacgcaaacccaaacgcaaaucccaacgcaaauccaaacgcaaacccugcagcauacauaaaacccggcucugcuaauaaacccaaagaugaacucgacuaugccaacgacauagaagcagccuacgcaaaauucguagcugcauggacauuaaaagcagcagcaccagugacaaacauggaaaacauuacaucaggauucuuagguccauuauuaguccuccaagcaggauucuucuuacuaacuagaauauuaacaauaccacaaucccuagacucuugguggacuucacuaaauuuccuaggaggauccccaguaugucucggucaaaauucucaaucaccuacaucaaaccauucaccaacaagcugccccccaaucugucccggauacagauggaugugccuacgcagauucauuauauuucuauucauacuacuucuaugccuaauauuccuacuaguccuucuagacuaccaaggaaugcuacccguaugcccacuuauaccaggauccacaacaacaaacacagguccaugcaaaacaugcacaacaccagcccaagguaauucuauguucccaucaugcuguugcacaaaaccaacagacgguaacugcacaugcaucccaauacccucaucaugggcauucgcaaaauaccuaugggaaugggcuucaguaagauucuccugguuaucccuuuuagucccauucguacaaugguucguaggauuaucacccacuguauggcuaucagcaauauggaugaugugguauuggggcccaucucuuuacucaaucgucuccccuuuuauuccacuacuacccauauuuuucugccuauggguauacauuuaaggacuagucccuguucccagagcccacuuuuuuuucuuuuuuugaaauaaaauagccugucuuucagaucucaaaggcucuuuucagagccaccaaaaaaaaaaaaaaaaaaaaaaaaaaaaaaaaaaaaaaaaaaaaaaaaaaaaaaaaaaaaaaaaagaauu

SEQ ID NO: 9243 - RNA, 2086 nt, Artificial Sequence
  mRNA Design a-1 (hSL-A64-N5) comprising derived and/or modified sequence from Pf(3D7)__XP_001351122.1__HsALB_Pf-CSP(19-384)_L(PVTN)_HBsAg (opt6)
aggagagucccgcagucggcguccagcggcucugcuuguucgugugugugucguugcaggccuuauucaagcuuaccaugaaauggguaaccuucauaucucucuuauuccuuuuuucaucugcauauucacuauuucaagaauaucaauguuauggaucaucaucaaacacccgaguacucaacgaauuaaauuacgacaacgcagguacuaacuuauacaacgaauuagaaaugaauuacuauggaaaacaagaaaacugguauucccucaaaaaaaacucucgaucucuaggcgaaaacgacgacggcaacaacgaagacaacgaaaaacuacguaaacccaaacacaaaaaacuaaaacaaccagcagauggaaacccagacccaaacgcaaacccaaacguagacccaaacgcaaauccaaacguagacccgaacgcaaauccaaauguagaucccaaugcuaauccaaaugccaacccaaacgcaaacccuaacgcuaaucccaacgcaaacccaaacgcaaacccaaaugcaaacccaaacgcaaaccccaacgcaaacccaaaugcaaauccaaaugcaaauccaaacgccaacccaaaugccaacccaaacgcaaauccaaacgcuaaccccaacgcaaaccccaacgccaaucccaacguagaccccaacgcaaacccaaaugcaaauccaaacgcaaaccccaaugcaaacccaaacgcuaacccuaaugcaaacccaaacgccaacccaaaugcaaaccccaacgccaacccaaacgcaaauccaaacgcaaacccaaacgcuaacccaaacgccaacccaaacgcaaacccaaacgcuaacccaaacgcaaacccaaaugcaaacccaaaugcuaauccaaauaaaaacaaccaaggaaacggccaaggacauaauaugccuaacgacccaaacagaaacguagacgaaaaugcaaacgcaaacuccgcaguaaaaaauaacaauaacgaagaacccuccgacaaacauauaaaagaauaucuaaacaaaauacaaaauucacucucuacugaaugguccccaugcucaguaacauguggaaacggaauccaaguacgcauaaaaccaggaucagcaaacaaaccaaaagacgaacuagacuacgcaaacgauauagaaaaaaaaauaugcaaaauggaaaaaugcuccuccguauucaacguagucaauucaucuccaguaaccaauauggaaaauauaaccuccggauuccuaggaccacuacucguuuuacaagcaggauucuucuuacuaacaagaauacucacuauaccacaaucccuggauucuugguggacaucccuaaauuucuuaggcggaucacccguaugccuaggccaaaauagccaaaguccaacuucaaaccacuccccaacuucuugcccaccaauaugccccggcuacagauggaugugccuucgacgauucauaauauuucuauucauacuauuacuaugucuaauauuccuacucguucuauuagacuaccaaggaauguuaccaguuugcccacuaauaccugguucaacaaccacuaacacuggucccugcaaaacauguaccaccccagcccaaggaaacucaauguuccccucaugcuguugcacaaaaccaaccgacggaaauugcacaugcauacccauaccaucuucuugggcauuugcuaaauaucuaugggaaugggcaucaguacgcuucucauggcuaucucuacuaguaccauucguccaaugguucguaggccuaucaccaacaguauggcuaucugcaauauggaugaugugguacuggggucccuccuuauauucaauuguaucaccuuuuaucccacuccuacccauauucuucuguuuauggguauacauauaaggacuagucccuguucccagagcccacuuuuuuuucuuuuuuugaaauaaaauagccugucuuucagaucucaaaggcucuuuucagagccaccaaaaaaaaaaaaaaaaaaaaaaaaaaaaaaaaaaaaaaaaaaaaaaaaaaaaaaaaaaaaaaaaagaauu

SEQ ID NO: 9244 - RNA, 1903 nt, Artificial Sequence
  mRNA Design a-1 (hSL-A64-N5) comprising derived and/or modified sequence from Pf(3D7)__XP_001351122.1__HsALB_Pf-CSP(19-384)_L(SGG)_Ferritin (opt6)
aggagagucccgcagucggcguccagcggcucugcuuguucgugugugugucguugcaggccuuauucaagcuuaccaugaaauggguaacauuuauaucucuauuauucuuauucuccucagcauacucacucuuucaagaauaccaaugcuacgguucuucauccaacacacgaguccuaaacgaauuaaacuacgacaaugcaggaaccaaucuauacaaugaacuugaaaugaacuacuacggaaaacaagaaaacugguacucccuaaaaaaaaacucacgaagccuaggagaaaaugacgacggaaacaacgaagacaacgaaaaacuacgaaaacccaaacacaaaaaacuaaaacaacccgccgacggcaauccagauccaaacgcaaacccaaacguagaccccaacgccaacccaaacguagauccaaacgcaaauccaaauguugauccaaaugcaaaccccaacgcaaacccaaacgcaaacccaaacgcaaacccaaacgcaaacccaaacgcaaauccaaaugcaaaucccaacgcaaauccaaacgcaaauccaaaugcaaacccaaacgcuaaucccaacgcuaacccaaacgcaaacccaaacgcaaacccgaacgcuaacccaaacgcaaacccaaacgcaaaccccaacguagacccaaacgcaaacccaaacgcaaaccccaacgcaaacccaaacgcaaacccaaacgcaaaccccaacgcaaaccccaacgcaaacccaaacgccaaccccaaugcaaacccaaacgccaacccaaacgcaaacccaaacgcaaacccaaacgcaaacccaaacgcaaauccaaacgcaaacccaaacgcaaacccaaacgcaaacccaaaugcaaacccaaacaaaaacaaccaaggaaauggacaaggacacaacaugccaaacgacccaaaccguaacguagaugaaaaugccaacgcaaacucagccguaaaaaacaacaacaacgaagaaccuucagacaaacacauaaaagaauacuuaaacaaaauacaaaacucauuaucaacugaauggucccccuguucagucacaugcggaaauggaauacaaguaagaauuaaaccagguucagccaacaaaccaaaagacgaacuagacuacgcaaacgacauugaaaaaaaaauauguaaaauggaaaaauguaguucagucuucaacguaguaaacucaucauccggaggauuauccaaagacauaauaaaacucuuaaaugaacaaguaaacaaagaaaugaacucgagcaaccucuauaugucaaugucauccuggugcuacacccauucccuagacggcgccggacuauuccuguucgaccaugcagcagaagaauaugaacacgcaaaaaagcuaaucaucuucuuaaacgaaaacaaugucccaguacaacuaaccuccauaucagcaccugaacauaaauucgaaggacuaacacaaauauuucaaaaagcauacgaacacgaacaacacauaucagaaucaauuaauaacauaguagaccacgcaaucaaaagcaaggaccacgcaacauucaacuuucuacaaugguacguagcagaacaacaugaagaagaaguacucuucaaagacaucuuagacaaaauugaacucauaggaaacgaaaaucacggacucuaccucgcagaccaguacguaaaaggaaucgcaaaaucacguaaaagcuaaggacuagucccuguucccagagcccacuuuuuuuucuuuuuuugaaauaaaauagccugucuuucagaucucaaaggcucuuuucagagccaccaaaaaaaaaaaaaaaaaaaaaaaaaaaaaaaaaaaaaaaaaaaaaaaaaaaaaaaaaaaaaaaaagaauu

SEQ ID NO: 9245 - RNA, 1864 nt, Artificial Sequence
  mRNA Design a-1 (hSL-A64-N5) comprising derived and/or modified sequence from Pf(3D7)__XP_001351122.1__HsALB_Pf-CSP(93-384)_L(PVTN)_HBsAg (opt6)
aggagagucccgcagucggcguccagcggcucugcuuguucgugugugugucguugcaggccuuauucaagcuuaccaugaaauggguaacuuuuauaucccuccuauuucuauuuucaucagccuauucaaaacuaaaacaacccgcagauggaaaucccgacccaaaugcaaauccaaauguagauccaaacgccaacccaaaugucgacccaaaugcaaacccaaacguagauccuaacgcaaacccaaaugcuaauccaaacgcuaacccaaacgcaaauccaaaugcuaacccaaacgcaaacccuaacgcaaacccaaacgcuaacccaaacgcaaacccaaacgccaacccaaacgcaaaccccaacgcaaacccuaacgcaaacccaaacgcaaacccaaaugccaacccaaacgcaaacccaaacgcaaacccaaacguagaccccaacgcuaauccaaaugcaaauccaaacgcaaacccaaaugccaacccaaacgccaacccuaaugcaaacccaaacgcaaacccaaaugcaaaccccaacgcaaauccaaacgcaaauccaaaugcaaacccaaacgcuaacccaaacgcaaaccccaaugcaaacccaaacgcaaauccaaaugcaaacccaaaugcaaauccaaaugcaaacccaaauaaaaacaaccaaggaaacggacaaggccauaacaugccaaacgacccaaaccgcaacgucgaugaaaacgccaacgcaaauucagcgguuaaaaacaacaacaaugaagaacccucagacaaacacauaaaagaauacuuaaacaaaauacaaaacucacuaucgacagaaugguccccaugcuccguaaccugcgguaauggaauacaagucagaauaaaaccaggaucagcuaauaaaccaaaagacgaauuagacuacgcaaacgacauagaaaagaaaauaugcaaaauggaaaaauguucuucaguauuuaacguagucaacucaucacccguaacuaacauggaaaacauaaccucaggauuucuagguccuuuacucguacuacaagcaggauuuuuccuacuuacccgaauccuaacaauaccucaaucucuagacucaugguggacaucccuaaauuucuuaggcggaucaccaguuugccucggacaaaacucucaaucaccaacuucaaaucacuccccaacaucuugcccaccaauaugcccaggauaucgauggaugugucuacgacguuuuauaauauuucuauuuauacuacuacucugucuaauauuccuauuaguacuacucgacuaucaaggaaugcuccccgucuguccccucauacccggaucaacaacuacaaacaccggaccgugcaaaaccugcacaaccccagcucaaggaaauucaauguucccaucaugcugcuguacaaaaccaacagauggaaacugcacaugcauaccaaucccaucaagcugggccuuugccaaauauuuaugggaaugggccuccgucagauucucauggcucucccuucuaguuccauucguacaaugguuuguaggccuauccccaaccguauggcuauccgccauauggaugaugugguauuggggaccaucacuauacucaauaguauccccauucauaccacuccuacccauauucuuuugccuauggguauacauuuaaggacuagucccuguucccagagcccacuuuuuuuucuuuuuuugaaauaaaauagccugucuuucagaucucaaaggcucuuuucagagccaccaaaaaaaaaaaaaaaaaaaaaaaaaaaaaaaaaaaaaaaaaaaaaaaaaaaaaaaaaaaaaaaaagaauu

SEQ ID NO: 9246 - RNA, 1525 nt, Artificial Sequence
  mRNA Design a-1 (hSL-A64-N5) comprising derived and/or modified sequence from Pf(3D7)__XP_001351122.1__HsALB_Pf-CSP(199-377)_L(PVTN)_HBsAg (opt6)
aggagagucccgcagucggcguccagcggcucugcuuguucgugugugugucguugcaggccuuauucaagcuuaccaugaaauggguaacauucauaucauuacucuucuuauuuuccucugcauacucagauccaaaugcaaacccaaaugcaaacccaaacgcaaacccaaaugccaauccaaaugcaaacccaaaugcaaacccaaacgcaaacccaaacgcaaacccaaacgcaaacccuaaugcaaacccaaaugcaaauccaaacgcuaacccaaacgcaaacccaaaugccaacccaaacgccaauccaaacgcaaacccaaacgcaaaucccaaugcaaacccuaacaaaaacaaucaaggaaacggacaaggccacaacaugccaaaugacccaaaccgcaauguagacgaaaaugccaacgcaaacuccgcuguaaaaaacaauaacaacgaagaaccuuccgauaaacauauaaaagaauacuuaaauaaaauacaaaauucauuaucaacagaauggucaccaugcucagucacaugcggaaauggaauacaaguaagaauaaaacccgguuccgcaaacaaaccaaaagacgaacuagacuacgcaaaugacaucgaaaaaaaaauaugcaaaauggaaaaauguucuucaguaccaguaacaaacauggaaaacaucaccucuggauuccuaggaccacuauuaguacuacaagcaggauucuuccuccuaacaagaauauuaacaauaccacaaucacuugacucaugguggacaucccucaauuuccuaggaggauccccaguaugucuaggucaaaacucucaaucuccaacauccaaccauucacccacaucaugcccucccauaugcccaggauaccgauggaugugccucagaagauucauaauauuccuauucauauuacuccuauguuuaaucuuucuacuagucuuauuagacuaccaaggaaugcuaccaguaugcccacuaaucccaggauccacaacaacaaacacaggccccugcaaaacauguacaacaccagcacaaggaaacucaauguucccaucaugcuguugcacaaaaccaacagacggaaacugcacaugcaucccaauaccaucaucuugggcauuugcaaaauacuuaugggaaugggcaucaguacgcuuuucauggcucucccuccucguaccauucguccaaugguucguaggucuaucaccaacaguuuggcuauccgcuauauggaugaugugguauuggggcccuucccuauacucaauaguuucaccauuuauaccacuccuaccaauauuuuucugccuuuggguauacauauaaggacuagucccuguucccagagcccacuuuuuuuucuuuuuuugaaauaaaauagccugucuuucagaucucaaaggcucuuuucagagccaccaaaaaaaaaaaaaaaaaaaaaaaaaaaaaaaaaaaaaaaaaaaaaaaaaaaaaaaaaaaaaaaaagaauu

SEQ ID NO: 9247 - RNA, 1222 nt, Artificial Sequence
  mRNA Design a-1 (hSL-A64-N5) comprising derived and/or modified sequence from Pf(3D7)__XP_001351122.1__HsALB_Pf-CSP(19-272)_L(AAY)_Pf-CSP(346-3 75)_L(AAY)_Pf-CSP(310-327) (opt6)
aggagagucccgcagucggcguccagcggcucugcuuguucgugugugugucguugcaggccuuauucaagcuuaccaugaaauggguaaccuucauuucacuucucuuccuauucuccagcgcauacucacucuuccaagaauaccaaugcuacggcucaaguuccaacacacgaguacuaaacgaauuaaacuacgacaaugcuggaaccaaccuauacaacgaacucgaaaugaacuacuacgguaaacaagaaaacugguauucacuaaaaaaaaacucaaggucccuaggagaaaacgacgacggaaacaacgaagacaacgaaaaauuaagaaaaccaaaacacaaaaaacuaaaacaacccgcagacggaaaccccgacccaaacgcaaacccaaacguagauccaaacgcaaacccaaacguagacccaaacgcaaacccaaacguagacccaaacgcaaacccuaaugcaaacccaaacgcaaacccaaacgcaaacccaaacgcaaacccaaacgcaaacccaaacgcaaaccccaacgccaacccaaacgcaaacccaaacgcaaacccaaacgcaaacccaaacgcaaacccaaacgcaaacccaaacgcaaacccaaacgcaaacccaaaugcaaacccaaacgcaaacccaaacguagacccaaacgcaaacccaaacgcaaacccaaaugcaaacccaaacgcaaacccaaacgcaaacccaaacgcuaacccaaacgcaaacccaaacgcuaauccaaaugcuaaccccaacgcaaacccaaaugcaaacccaaacgcuaauccaaaugcaaauccaaacgcaaacccaaacgcaaacccaaacgcaaacccaaacgcaaacccaaacgcaaauccagccgcauacauaaaacccggcucagcaaacaaaccaaaagacgaacuagacuacgccaacgacauagaaaaaaaaauaugcaaaauggaaaaaugcucagccgcauacgaaccaucagacaaacacaucaaagaauacuuaaacaaaauacaaaacagcuuauaaggacuagucccuguucccagagcccacuuuuuuuucuuuuuuugaaauaaaauagccugucuuucagaucucaaaggcucuuuucagagccaccaaaaaaaaaaaaaaaaaaaaaaaaaaaaaaaaaaaaaaaaaaaaaaaaaaaaaaaaaaaaaaaaagaauu

SEQ ID NO: 9248 - RNA, 1270 nt, Artificial Sequence
  mRNA Design a-1 (hSL-A64-N5) comprising derived and/or modified sequence from Pf(3D7)__XP_001351122.1__HsALB_Pf-CSP(19-272)_L(AAY)_Pf-CSP(346-3 75)_L(AAY)_Pf-CSP(310-327)_L(AAY)_PADRE (opt6)
aggagagucccgcagucggcguccagcggcucugcuuguucgugugugugucguugcaggccuuauucaagcuuaccaugaaauggguaacauucauaucacuacuauuccuauucucauccgccuacucacucuuucaagaauaucaaugcuacggaucaagcucaaauacaagaguacuaaacgaacuaaacuacgacaacgcaggaaccaaccuauacaacgaacuagaaaugaacuacuacggaaaacaagaaaacugguacucacuuaaaaaaaacucaagaucacuaggagaaaacgacgacggaaacaacgaagacaacgaaaaacuacgaaaaccaaaacauaaaaaacuaaaacaaccagcagacggaaacccagacccaaacgcaaauccaaacguagacccaaaugcaaacccaaacguagacccaaacgcaaacccaaacguagacccaaaugcaaacccaaacgcaaauccaaacgcaaacccaaacgcaaacccaaacgcaaacccaaacgcaaacccaaacgcaaacccaaaugcaaauccaaacgcaaacccaaaugcaaacccaaacgcaaacccaaacgcgaacccaaacgccaaccccaacgcaaacccaaacgcaaauccaaaugcaaacccaaacgccaauccaaacguagacccaaacgcaaauccaaacgcaaacccaaacgcaaacccaaacgcaaacccuaacgcaaacccaaacgcaaacccaaacgcaaacccaaacgccaacccaaacgcaaaccccaacgcaaacccaaacgcaaacccaaacgcaaaccccaacgcaaauccaaacgcuaacccaaacgcuaaccccaacgcaaacccaaaugcaaacccaaacgccaacccagccgcauacauaaaaccaggaucagcaaauaaaccaaaagacgaacuagacuacgcaaacgacauagaaaaaaaaauaugcaaaauggaaaaaugcuccgcagcauacgaaccaucagacaaacacaucaaagaauaccuaaacaaaauccaaaacucacuagccgccuacgcaaaauuugucgcagcauggacacucaaagcagcagcauaaggacuagucccuguucccagagcccacuuuuuuuucuuuuuuugaaauaaaauagccugucuuucagaucucaaaggcucuuuucagagccaccaaaaaaaaaaaaaaaaaaaaaaaaaaaaaaaaaaaaaaaaaaaaaaaaaaaaaaaaaaaaaaaaagaauu

SEQ ID NO: 9249 - RNA, 1270 nt, Artificial Sequence
  mRNA Design a-1 (hSL-A64-N5) comprising derived and/or modified sequence from Pf(3D7)__XP_001351122.1__HsALB_Pf-CSP(19-272)_L(AAY)_Pf-CSP(310-3 27)_L(AAY)_Pf-CSP(346-375)_L(AAY)_PADRE (opt6)
aggagagucccgcagucggcguccagcggcucugcuuguucgugugugugucguugcaggccuuauucaagcuuaccaugaaauggguaaccuucauaucccuacuauuucuauucuccucagcauacucacuauuccaagaauaccaaugcuacggcucaucaucaaacacaagaguacuaaaugaacuaaacuacgacaacgccggaaccaaccuauacaaugaacucgaaaugaauuacuacggaaaacaagaaaacugguacucacuaaaaaaaaacucaagaagccuaggagaaaacgacgacggaaacaacgaagacaacgaaaaauuacgaaaaccaaaacauaaaaaacuaaaacaacccgccgacggaaacccagacccaaacgcaaacccaaacguagacccaaacgcaaauccaaacguagacccaaacgcaaauccaaauguagacccaaacgcaaacccaaacgcaaacccaaacgcaaacccaaacgcaaacccgaacgcaaauccaaacgcaaacccaaacgcaaacccaaacgcaaacccaaacgcaaacccaaacgcaaaccccaacgcaaacccaaaugcaaacccaaacgcaaacccaaaugcaaauccaaacgcaaacccaaacgcaaacccaaacgcaaacccaaacguagacccaaaugcaaaccccaacgcaaacccaaacgcaaacccaaacgcaaacccaaacgcaaacccaaacgcaaacccaaacgcaaacccaaacgcaaacccaaacgccaauccaaacgcaaauccaaacgcaaacccaaacgcaaacccaaacgcaaacccaaacgcaaacccaaacgcaaacccaaacgcaaacccaaaugcaaacccaaacgcaaacccagcagcauacgaaccuucagacaaacacauaaaagaauacuuaaacaaaauacaaaacucacuagcagccuacaucaaaccaggauccgcaaacaaaccaaaagacgaacuagacuacgcaaacgacauagaaaaaaaaauauguaaaauggaaaaaugcucagccgcauaugcuaaauucgucgcagcauggaccuuaaaagcagcagcauaaggacuagucccuguucccagagcccacuuuuuuuucuuuuuuugaaauaaaauagccugucuuucagaucucaaaggcucuuuucagagccaccaaaaaaaaaaaaaaaaaaaaaaaaaaaaaaaaaaaaaaaaaaaaaaaaaaaaaaaaaaaaaaaaagaauu

SEQ ID NO: 9250 - RNA, 1324 nt, Artificial Sequence
  mRNA Design a-1 (hSL-A64-N5) comprising derived and/or modified sequence from Pf(3D7)__XP_001351122.1__HsALB_Pf-CSP(19-272)_L(AAY)_Pf-CSP(310-3 27)_L(AAY)_Pf-CSP(346-375)_L(AAY)_PADRE_L(AAY)_P2 (opt6)
aggagagucccgcagucggcguccagcggcucugcuuguucgugugugugucguugcaggccuuauucaagcuuaccaugaaaugggucaccuucaucucacuacuauuuuuauucuccagcgcauacucauuauuccaagaauaccaaugcuauggcucaagcucaaacacaagaguauuaaacgaacuaaacuacgauaacgccggaacaaaccuauacaacgaacucgaaaugaacuacuauggaaaacaagaaaacugguacucacuuaaaaaaaauucaagaucucuaggagaaaacgacgacggaaacaaugaagacaacgagaaauuaagaaaaccaaaacacaaaaaacuaaaacaaccagcagacggaaacccagacccaaacgcaaacccaaacguagacccaaacgcaaacccaaacguagacccaaacgcaaacccaaacguagauccgaacgcaaauccaaacgcaaauccaaacgcaaacccaaaugcaaacccaaaugcaaacccaaaugcaaacccaaacgcaaacccaaacgcaaacccaaacgcaaaccccaacgcaaacccaaacgcaaauccaaacgcaaacccaaacgcaaacccaaacgcaaaccccaacgcaaacccaaacgcaaacccgaacgcgaacccaaacguggauccaaacgcaaacccaaaugcaaaucccaacgcaaacccaaaugcaaacccaaacgcaaacccaaacgcaaacccaaacgcaaacccaaaugcaaacccaaacgcaaacccaaacgcaaacccaaacgcaaacccaaacgcaaauccaaacgcaaauccaaaugcaaacccaaacgcaaacccaaacgcaaaccccaacgcaaauccaaacgcaaacccagccgcauacgaaccaucagacaaacauauaaaagaauaucuaaacaaaauucaaaacucacucgcagcauacauaaaaccaggaagcgcaaacaaaccuaaagacgaacuagacuacgcaaacgacauagaaaaaaaaauaugcaaaauggaaaaaugcucagcagcguacgcaaaauucguagcagcauggacacuaaaagcagcagccgcagcauaccaauacauaaaagcaaauucaaaauucaucggaauuacagaacuauaaggacuagucccuguucccagagcccacuuuuuuuucuuuuuuugaaauaaaauagccugucuuucagaucucaaaggcucuuuucagagccaccaaaaaaaaaaaaaaaaaaaaaaaaaaaaaaaaaaaaaaaaaaaaaaaaaaaaaaaaaaaaaaaaagaauu

SEQ ID NO: 9251 - RNA, 1288 nt, Artificial Sequence
  mRNA Design a-1 (hSL-A64-N5) comprising derived and/or modified sequence from Pf(3D7)__XP_001351122.1__HsALB_Pf-CSP(19-272)_L(AAY)_Pf-CSP(310-3 27)_Linker (AAY)_Pf-CSP(346-397) (opt6)
aggagagucccgcagucggcguccagcggcucugcuuguucgugugugugucguugcaggccuuauucaagcuuaccaugaaauggguuacauucauaucauuacuauuccucuuuuccucagcauacucacucuuucaagaauaccaaugcuacggcucauccucaaacacaagaguacucaacgaacucaacuaugacaacgcaggaacaaaccucuacaacgaacuugaaaugaauuacuauggaaaacaagaaaacugguacucauuaaaaaaaaacucaagauccuuaggcgaaaacgacgacggaaacaacgaagacaacgagaaacuccgaaaaccaaaacacaaaaaacuaaaacaaccagcagacggaaacccagacccaaacgcaaacccaaacguagacccaaacgcaaacccaaacguagacccaaacgcaaacccaaacguagacccaaacgcaaacccaaacgcaaacccaaacgcaaacccaaacgcaaacccaaacgcaaacccaaacgcaaacccaaacgcaaacccaaacgcaaacccaaacgcaaacccaaacgcaaacccaaacgccaacccaaacgcaaacccaaacgccaacccaaacgcaaacccaaacgcaaacccaaacgcaaauccaaacgccaacccaaacguagacccaaacgcaaacccaaacgcaaacccaaacgcaaacccaaacgcaaaccccaacgccaacccaaacgccaaccccaacgcaaauccaaacgcaaacccaaacgcaaaccccaacgcaaacccaaacgcaaacccaaacgcaaacccaaacgcuaacccaaacgcaaaccccaacgcaaauccaaacgcaaacccaaacgcaaacccaaaugcaaacccagcagcauaugaaccuucagauaaacacauaaaagaauaccuaaacaaaauccaaaacucucucgcagccuacaucaaaccaggaucagcaaacaaacccaaagacgaacuagacuacgcaaaugauaucgaaaaaaaaauaugcaaaauggaaaaaugcucgagcguauuuaacguaguaaacucaucaaucggacucauaaugguacuaucauuucuauuccucaacuaaggacuagucccuguucccagagcccacuuuuuuuucuuuuuuugaaauaaaauagccugucuuucagaucucaaaggcucuuuucagagccaccaaaaaaaaaaaaaaaaaaaaaaaaaaaaaaaaaaaaaaaaaaaaaaaaaaaaaaaaaaaaaaaaagaauu

SEQ ID NO: 9252 - RNA, 1888 nt, Artificial Sequence
  mRNA Design a-1 (hSL-A64-N5) comprising derived and/or modified sequence from Pf(3D7)__XP_001351122.1__LumSynt_L(GGS4-GGG)_Pf-CSP(19-397) (opt11)
aggagagucccgcagucggcguccagcggcucugcuuguucgugugugugucguugcaggccuuauucaagcuuaccaugcaaauauacgagggcaaacucacggcugaaggccuacgcuuuggcaucgucgcaucacgguucaaucacgcacucguggacaggcucguagaaggugccaucgacgcaauaguacgccacggcgggcgcgaagaggacauaacgcuaguacgcguacccggaagcugggaaauccccguagccgcaggcgaacucgcacgcaaagaagacaucgacgccgugaucgcaauaggaguccugauccgaggcgcaacaccacacuucgacuacaucgccuccgaagucucaaaaggccuagcggaucugagccucgaacugcgcaaaccuauaacauucggcgucauaacagccgacacauuagaacaggccauagaaagagccggaaccaaacauggaaacaaaggcugggaagcggcccuaagcgccaucgaaauggcaaaccucuucaaaagccugcgcggaggaucaggcggcagcggcggcuccggaggaagcggcggcggucuuuuucaagaauaccaaugcuacggcuccucaucgaacacacgcguacucaaugaacugaacuacgacaaugcaggaaccaaccucuacaacgaacucgagaugaacuacuacggcaaacaagaaaacugguacucgcuaaagaaaaacuccagaucccugggcgaaaacgacgacggaaacaacgaagacaacgaaaaacuacgcaaaccaaaacacaagaaacuaaaacaaccagcagacggaaacccagacccaaacgcgaacccaaacgucgacccaaacgcaaacccaaacguagacccaaacgcaaacccaaacgucgaccccaacgcaaacccaaacgccaaccccaacgcaaaccccaacgcgaacccaaacgcgaaccccaacgcaaacccaaacgcaaaccccaacgcaaacccaaacgcaaacccaaacgccaacccgaaugccaacccgaacgcaaacccgaacgcaaaccccaacgcgaaccccaacgcaaacccaaaugccaaccccaacgcaaaccccaacguagacccgaacgcaaacccgaacgcaaacccgaacgcaaacccaaacgcaaacccaaacgccaaccccaacgccaacccaaacgcgaacccaaaugcaaaccccaacgccaacccgaacgccaacccaaacgcaaacccgaacgcaaaccccaacgcaaaccccaacgcaaaccccaacgcaaacccgaacgccaacccaaacgcaaacccaaacgcaaacccaaacaaaaacaaccaaggaaacgggcaaggccacaacaugcccaacgacccaaaccgaaauguagaugaaaacgcaaacgccaacagcgcggucaaaaacaacaacaacgaagaacccucggacaaacacauaaaagaauaccuaaacaaaauccagaacucccucucaacagaauggucccccugcucaguuaccugcgguaaugguauacaaguccgcauuaaaccgggaucugccaacaaaccaaaagaugagcuagacuacgccaacgacauagaaaagaaaaucugcaaaauggagaaaugcuccucagucuucaacguaguaaacagcucgauagggcucaucaugguacucuccuuuuuauuccucaacuaaggacuagucccuguucccagagcccacuuuuuuuucuuuuuuugaaauaaaauagccugucuuucagaucucaaaggcucuuuucagagccaccaaaaaaaaaaaaaaaaaaaaaaaaaaaaaaaaaaaaaaaaaaaaaaaaaaaaaaaaaaaaaaaaagaauu

SEQ ID NO: 9253 - RNA, 1750 nt, Artificial Sequence
  mRNA Design a-1 (hSL-A64-N5) comprising derived and/or modified sequence from Pf(3D7)__XP_001351122.1__HsALB_Pf-CSP(19-272)_L(PVTN)_HBsAg (opt11)
aggagagucccgcagucggcguccagcggcucugcuuguucgugugugugucguugcaggccuuauucaagcuuaccaugaaaugggucaccuucaucucccuccucuuccucuucuccucugccuacucacucuuccaagaauaccaaugcuacggcuccucuuccaacacccgcguacucaacgaacucaacuaugacaaugcaggaaccaaccuauacaacgagcuagagaugaacuacuacggcaaacaagaaaacugguacucccucaagaaaaacucacgcucccuuggcgaaaaugacgacggcaacaacgaagacaacgaaaaacuucgcaaacccaaacacaagaaauuaaaacaaccagccgacggcaacccagaccccaacgccaaccccaacgucgaccccaacgccaacccuaacgucgaccccaacgcaaacccuaacgucgauccaaacgccaaccccaacgcuaaccccaacgcaaauccgaacgcaaaccccaacgccaacccuaacgccaaccccaacgccaacccaaacgccaaccccaacgcuaaccccaacgcaaacccgaacgccaaccccaacgccaaccccaacgcaaaccccaacgccaaccccaaugcaaaccccaacgccaacccaaaugccaaccccaacgucgaccccaacgcaaaccccaacgcuaacccuaacgcuaacccaaacgccaacccaaacgcuaaccccaacgccaaccccaacgccaaccccaacgcaaacccaaacgcaaacccuaacgccaacccuaacgcaaaccccaacgcgaaccccaacgcaaaccccaacgcaaaccccaacgccaaccccaacgccaacccaaacgccaauccaaacgcaaaucccccagucaccaacauggaaaacaucaccucaggcuuccucggcccccuucucguccuacaagcugguuucuuccuucuaacccgcauccucacgaucccccaaucccucgacucaugguggaccucacucaacuuucucggaggcucacccguaugccucggacaaaacucccaaucccccaccuccaaccauuccccaaccucaugcccaccaauaugccccggcuaccguuggaugugccuccgccguuucaucauauuccuuuucauacuccuccucugccucaucuuccugcucgugcuccuagacuaucaagguaugcuacccguaugcccacucauccccggcucaaccacgacaaacacuggccccugcaaaacaugcaccacacccgcacaaggaaacuccauguuccccucaugcugcugcaccaaaccaacagacggaaacuguaccugcaucccuauccccuccuccugggccuucgcaaaauaucuaugggagugggccagcguacgcuuuuccuggcuuucccuccugguccccuucguccaaugguucguaggccucuccccaaccguauggcuauccgcaaucuggaugaugugguacuggggcccaucucucuacucaauaguaucacccuucaucccacuccuccccaucuucuucugccucuggguauacaucuaaggacuagucccuguucccagagcccacuuuuuuuucuuuuuuugaaauaaaauagccugucuuucagaucucaaaggcucuuuucagagccaccaaaaaaaaaaaaaaaaaaaaaaaaaaaaaaaaaaaaaaaaaaaaaaaaaaaaaaaaaaaaaaaaagaauu

SEQ ID NO: 9254 - RNA, 1867 nt, Artificial Sequence
  mRNA Design a-1 (hSL-A64-N5) comprising derived and/or modified sequence from Pf(3D7)__XP_001351122.1__HsALB_Pf-CSP(19-272)_L(AAY)_Pf-CSP(346-3 65)_L(AAY)_PADRE_L(PVTN)_HBsAg (opt11)
aggagagucccgcagucggcguccagcggcucugcuuguucgugugugugucguugcaggccuuauucaagcuuaccaugaaauggguaaccuucauaucccuucuauucuuauucucuuccgcauacucccucuuccaagaauaucagugcuacggcucauccucaaacacacgaguccucaacgaacucaacuacgacaacgccggcaccaaucucuacaacgaacucgaaaugaacuacuacggcaaacaagaaaacugguacucccuuaagaaaaacucacgcucucucggcgaaaacgacgacggcaacaacgaagacaacgaaaaauuacgcaaacccaaacacaagaaacucaaacaaccagccgacggcaacccagaccccaaugcaaacccuaacgucgaccccaacgccaacccuaacgucgacccaaacgccaacccgaacgucgaccccaacgcaaacccaaacgccaaccccaaugccaaucccaacgccaacccuaacgccaaccccaacgccaaccccaacgccaacccuaacgccaaccccaaugcaaacccaaacgccaacccaaacgcaaacccaaacgccaauccaaacgccaacccaaacgccaaccccaacgccaacccaaacgccaaucccaacgccaaccccaacguagaccccaaugcgaacccaaacgccaacccuaacgccaaccccaacgcaaacccaaacgcuaacccaaacgcaaaccccaacgcaaaccccaacgcaaacccgaacgcgaaccccaacgccaauccaaacgcaaacccuaacgcaaacccaaacgccaacccaaacgccaacccaaacgcaaacccaaacgccaauccaaacgcaaacccgaacgcaaaccccgccgcuuacaucaaacccggaucggccaacaaacccaaagacgaacuugauuacgccaacgacaucgaagcagccuacgcaaaauucguagcggccuggacccuaaaagcagcagcacccgucacaaacauggaaaacaucacaucuggcuucuuaggcccacuccuaguccuccaggccggcuucuuccuacuaacccguauacucaccauaccacaaucacucgacucaugguggaccucccuaaacuuccucggcggaucacccgucugccugggccaaaacucgcaaucccccaccucaaaucauucgcccacaucaugcccgcccaucugccccggcuaccgguggaugugccuccgcagauucauaaucuuccucuucauacuacuacuuugccuaaucuuccucuuaguccuacucgacuaccaaggcaugcuccccgucugcccccuuauacccggcuccaccaccaccaauaccggccccugcaaaaccugcacaacacccgcccaaggcaacucaauguucccguccugcuguugcaccaaaccaaccgacggaaauugcacaugcaucccaauccccucaucaugggcauucgccaaauaccucugggaaugggccuccguccguuucuccuggcucagccuacucguucccuucguccaaugguuugucggccuuucaccuacaguauggcuauccgccauauggaugaugugguacuggggacccucacucuacucaauugucucccccuucaucccauuacuccccaucuucuucugccucugggucuacauauaaggacuagucccuguucccagagcccacuuuuuuuucuuuuuuugaaauaaaauagccugucuuucagaucucaaaggcucuuuucagagccaccaaaaaaaaaaaaaaaaaaaaaaaaaaaaaaaaaaaaaaaaaaaaaaaaaaaaaaaaaaaaaaaaagaauu

SEQ ID NO: 9255 - RNA, 2086 nt, Artificial Sequence
  mRNA Design a-1 (hSL-A64-N5) comprising derived and/or modified sequence from Pf(3D7)__XP_001351122.1__HsALB_Pf-CSP(19-384)_L(PVTN)_HBsAg (opt11)
aggagagucccgcagucggcguccagcggcucugcuuguucgugugugugucguugcaggccuuauucaagcuuaccaugaaaugggucaccuucauaucacuccuauuccuauuuucaagcgccuacucccucuuccaagaauaucaaugcuauggcucaagcucaaacacccgcguccucaacgagcuaaacuacgacaacgcaggaaccaaccucuacaacgaacuggaaaugaacuacuacggaaaacaagagaacugguacuccuuaaagaaaaacucccgcucccucggcgaaaacgaugacgguaacaacgaagacaaugaaaaacuccgaaaacccaaacacaagaaacuaaaacaaccagccgacggaaaccccgacccgaacgcaaaccccaacguagacccaaacgcaaacccuaauguagacccaaacgccaacccaaacgucgacccaaacgcaaacccaaacgcuaaccccaacgccaacccaaacgccaaccccaacgccaaccccaaugccaacccaaacgcgaaccccaacgcaaaccccaacgccaacccgaacgccaacccaaacgccaacccaaacgccaaccccaacgcgaacccaaacgccaacccaaacgcuaaccccaacgcaaaccccaacgccaacccuaacgucgacccaaacgccaaucccaacgccaaccccaacgcaaaccccaacgccaacccgaacgcgaaccccaacgcaaaccccaacgcaaacccaaacgccaaccccaacgccaacccaaacgccaacccgaacgccaacccaaacgcgaaucccaaugccaaccccaacgccaauccuaaugcaaacccaaacgcaaaccccaacgccaauccgaacgcaaacccgaacaaaaacaaccaagguaacggccaaggccacaacaugcccaacgaccccaaccgcaacgucgacgaaaacgcaaacgccaacuccgcaguuaaaaacaacaacaacgaagaaccaucagacaaacacauaaaagaauaccucaacaaaauccaaaacucgcucuccaccgaauggucccccuguagcguaaccugcgguaauggaauacaaguccgaaucaaaccaggcucugccaacaaacccaaagacgaacuagacuacgccaacgacauugaaaagaaaaucugcaaaauggaaaaauguagcuccgucuucaacguagucaacuccucccccguuaccaacauggagaacauaaccuccggcuuccucggcccccuucucgugcuacaggccggauucuuccuccuaaccaggauccuaaccaucccccagucacucgacuccugguggaccucacucaacuuccucggcggaucccccgucugccucggacaaaacucccaaucccccaccucaaaccacuccccaaccucuugcccgcccauaugccccgguuaccgcuggaugugccuucgccgcuucaucauauuucuauucauccuccuucucugccuaauauuccuacucguacuccucgacuaccaaggcaugcuacccgucugcccucuuauacccggauccacgacaaccaacaccggccccugcaaaaccugcaccacacccgcccaaggcaacucuauguuccccucaugcugcugcacaaaacccaccgacggcaacugcacaugcauaccaauccccucuuccugggccuuugccaaauaccuuugggaaugggcuuccguccguuuuuccugguuaucccuccuggucccauucguccaaugguucgucggccuuucaccaaccgucuggcuauccgccaucuggaugaugugguacuggggucccucccucuacagcaucgucucaccauuuaucccccuccugcccaucuucuucugcuuguggguauacauaugaggacuagucccuguucccagagcccacuuuuuuuucuuuuuuugaaauaaaauagccugucuuucagaucucaaaggcucuuuucagagccaccaaaaaaaaaaaaaaaaaaaaaaaaaaaaaaaaaaaaaaaaaaaaaaaaaaaaaaaaaaaaaaaaagaauu

SEQ ID NO: 9256 - RNA, 1903 nt, Artificial Sequence
  mRNA Design a-1 (hSL-A64-N5) comprising derived and/or modified sequence from Pf(3D7)__XP_001351122.1__HsALB_Pf-CSP(19-384)_L(SGG)_Ferritin (opt11)
aggagagucccgcagucggcguccagcggcucugcuuguucgugugugugucguugcaggccuuauucaagcuuaccaugaaaugggucaccuucauaucacuacuuuuccuguucuccucagcauacucacucuuccaagaguaccaaugcuacggcucaucauccaauacccgcguacuuaacgaauuaaacuacgacaacgcaggcaccaaccucuacaacgaacucgaaaugaacuauuacggaaaacaagaaaacugguacucacuaaagaaaaacagcagaucccucggcgaaaacgacgacggcaauaacgaagacaacgaaaaacugagaaaaccuaaacacaagaaacucaaacaacccgcagacggcaaccccgaccccaacgccaacccaaacguagaccccaacgccaaccccaacgucgaccccaacgccaacccuaaugucgacccaaacgcaaacccuaacgcaaaccccaaugccaacccaaacgccaaccccaacgcaaaccccaacgcaaauccaaacgcaaaucccaacgcaaaccccaaugccaaccccaacgcaaacccaaacgccaaccccaacgcaaaccccaacgcuaacccaaacgccaacccaaacgcaaacccaaacgccaaccccaacgcuaaccccaacgucgaccccaacgccaaccccaacgcaaacccaaacgccaaccccaaugcaaacccaaacgccaaccccaacgcaaacccaaacgccaacccaaacgccaaccccaacgcaaaccccaacgcuaaccccaacgcaaaccccaaugcaaacccgaacgccaacccaaacgcaaacccaaacgccaacccaaacgccaaccccaacgccaacccaaacgccaacccaaacaaaaacaaccaagguaacggacaaggccacaacaugcccaacgauccuaaccgcaacguagacgaaaacgccaacgcaaacagcgcagucaaaaacaacaacaacgaggaaccaucagacaaacacaucaaagaauaccucaacaaaauccaaaacucccuauccacagaauggucacccugcuccguaaccugcggcaacggcauccaaguacgcaucaaacccggauccgcaaacaaaccaaaagaugaauuagauuaugcaaacgacauagaaaagaaaauaugcaaaauggaaaaaugcuccuccguauucaacguagucaacuccucuucagggggacucuccaaagacaucaucaaacuucucaacgaacaagucaacaaagagaugaacagcuccaaccucuacaugucaaugucaagcuggugcuacacacacucacuggacggcgccggccucuuccuauucgaccacgccgcagaagaauacgaacacgccaagaaacuuauaaucuuccuaaacgaaaauaacguaccuguccaacucacaucaaucucggccccagaacauaaauucgaagggcucacgcaaauauuucaaaaagcauacgaacacgaacagcacaucuccgaaucaaucaacaacauugucgaccacgcaaucaaauccaaagaccacgccacauucaacuuccuacaaugguacguggccgaacaacacgaagaagaaguccucuucaaagacauacuagacaaaaucgaacuaaucggcaacgaaaaccacggccucuaccuagccgaccaauacguaaaaggaaucgcgaaaucccgcaaauccuaaggacuagucccuguucccagagcccacuuuuuuuucuuuuuuugaaauaaaauagccugucuuucagaucucaaaggcucuuuucagagccaccaaaaaaaaaaaaaaaaaaaaaaaaaaaaaaaaaaaaaaaaaaaaaaaaaaaaaaaaaaaaaaaaagaauu

SEQ ID NO: 9257 - RNA, 1864 nt, Artificial Sequence
  mRNA Design a-1 (hSL-A64-N5) comprising derived and/or modified sequence from Pf(3D7)__XP_001351122.1__HsALB_Pf-CSP(93-384)_L(PVTN)_HBsAg (opt11)
aggagagucccgcagucggcguccagcggcucugcuuguucgugugugugucguugcaggccuuauucaagcuuaccaugaaaugggucaccuuuaucucacuccuauuucucuucucuuccgcauacuccaaacucaaacaacccgcagacggaaaccccgacccaaacgcaaaccccaacguagaccccaacgccaaccccaacgucgaccccaacgccaaccccaacguagaccccaacgcaaaccccaacgccaacccaaacgccaaccccaacgccaaccccaacgccaaucccaacgccaacccaaacgcaaaucccaacgcaaaccccaacgccaaccccaacgccaacccaaacgccaauccaaacgcaaacccuaacgccaacccuaacgcgaaccccaacgccaaccccaacgcaaaccccaacgccaaccccaaugucgaccccaacgccaaccccaacgccaaccccaacgcaaaccccaacgcaaacccaaacgccaaucccaacgccaaccccaacgcaaacccuaacgccaaccccaaugccaauccuaacgccaaccccaacgccaacccuaacgccaacccaaacgccaaccccaacgccaaccccaacgccaacccuaacgccaacccuaacgccaacccaaacgccaauccaaacaagaacaaccaaggcaacggucaaggccacaauaugccaaacgacccaaaccgaaacguagacgaaaacgccaacgccaacuccgccgucaaaaacaacaacaacgaagaacccuccgacaaacacaucaaagaauaucugaacaaaauccaaaacucccucuccaccgaauggucccccugcuccgucacuuguggcaauggcauacaaguccgcaucaaacccggcucagccaacaaacccaaagacgaacucgacuacgcaaacgacaucgaaaagaaaauaugcaaaauggaaaaaugcuccucugucuucaacgucgucaacuccucgcccguaaccaacauggaaaacaucaccucaggauuccucggcccccuacucguccuccaagccggcuucuuccuccucacccgaauccuuacaaucccccaaucccuugacucaugguggaccucccuuaauuuccucggcgguucccccgucugccuuggccaaaacucacaaucccccaccucaaaccacucccccacuuccugcccgcccauaugccccggcuaccgcuggaugugccuccgccgguucaucauauuccucuucauccuacuccucugccuuauauuucuauuaguccuccuagacuaccaaggaaugcuccccguaugcccacuaauccccggauccaccaccaccaacaccggccccugcaaaaccugcaccaccccugcacaaggaaacuccauguucccaucuuguugcugcacaaaaccaaccgacggcaacuguaccugcauccccaucccuucaucaugggccuucgccaaauaccuaugggaaugggccucaguacguuucuccuggcuaucccuccucgucccauucguucaaugguucgucggccuaucccccacgguauggcucuccgcaauauggaugaugugguacuggggccccucacuauacaguauaguuucccccuucauaccccuccuccccauauucuucugccucuggguauacaucuagggacuagucccuguucccagagcccacuuuuuuuucuuuuuuugaaauaaaauagccugucuuucagaucucaaaggcucuuuucagagccaccaaaaaaaaaaaaaaaaaaaaaaaaaaaaaaaaaaaaaaaaaaaaaaaaaaaaaaaaaaaaaaaaagaauu

SEQ ID NO: 9258 - RNA, 1525 nt, Artificial Sequence
  mRNA Design a-1 (hSL-A64-N5) comprising derived and/or modified sequence from Pf(3D7)__XP_001351122.1__HsALB_Pf-CSP(199-377)_L(PVTN)_HBsAg (opt11)
aggagagucccgcagucggcguccagcggcucugcuuguucgugugugugucguugcaggccuuauucaagcuuaccaugaaauggguaaccuucaucucccuccuauucuuauucucaucagccuacuccgacccaaacgcaaaccccaaugccaaccccaacgccaaccccaacgccaaucccaacgccaaccccaacgccaaucccaaugcuaaccccaacgccaacccaaacgccaacccaaacgcaaaccccaacgccaaccccaacgccaaccccaacgccaacccaaacgccaaccccaacgcaaaccccaacgccaacccaaacgccaaccccaacgccaacccaaacaaaaacaaucaaggcaacggccaaggacacaacaugcccaacgaccccaaccgcaacgucgacgaaaacgcaaacgccaacucugcagucaaaaacaacaacaacgaagaacccuccgacaaacacauaaaagaauaccucaacaaaauccaaaacucccucuccacagaaugguccccaugcuccgucacgugcggcaacggcauccaaguacgcaucaaacccggcucugccaacaaaccuaaagacgaacucgacuacgccaacgacaucgaaaagaaaaucugcaaaauggaaaaaugcuccucaguccccguaacuaacauggaaaacaucacguccggcuuccucggcccccuccuaguccuccaagccggcuucuuccuacucacacgcauucuuaccaucccgcaaucacucgacuccugguggaccucccucaacuucuuaggcggcuccccugucugccucggccaaaacucacaaucccccacuucaaaccacucacccaccagcugcccacccauaugcccaggauaccgcuggaugugccuccgccguuucauaaucuuccucuucauacuccuacucugccuaaucuuccuccucguacuccuagacuaccaaggcaugcuccccgucugcccacucauccccggaagcacuacaaccaacaccggccccugcaaaacaugcaccacccccgcacaaggcaacuccauguuccccuccugcugcugcacaaaacccacugauggcaacugcacuugcauccccauccccuccucaugggccuucgccaaauaucucugggaaugggccagcguccgguucucuuggcucucacuccuaguccccuucguucaaugguucguaggccuaucccccaccgucuggcucuccgcaauauggaugaugugguauuggggccccucccucuacuccauuguaucccccuucaucccacuacuccccaucuucuucugccuuugggucuacauauaaggacuagucccuguucccagagcccacuuuuuuuucuuuuuuugaaauaaaauagccugucuuucagaucucaaaggcucuuuucagagccaccaaaaaaaaaaaaaaaaaaaaaaaaaaaaaaaaaaaaaaaaaaaaaaaaaaaaaaaaaaaaaaaaagaauu

SEQ ID NO: 9259 - RNA, 1222 nt, Artificial Sequence
  mRNA Design a-1 (hSL-A64-N5) comprising derived and/or modified sequence from Pf(3D7)__XP_001351122.1__HsALB_Pf-CSP(19-272)_L(AAY)_Pf-CSP(346-3 75)_L(AAY)_Pf-CSP(310-327) (opt11)
aggagagucccgcagucggcguccagcggcucugcuuguucgugugugugucguugcaggccuuauucaagcuuaccaugaaauggguaaccuucaucucacuccuauuccuguucuccagugcauacucacucuuccaagaauaccaaugcuacggcuccagcagcaacacgcgaguccucaacgaacuaaacuacgauaacgccggaaccaaccuuuacaacgaacucgaaaugaacuacuacggcaaacaagaaaacugguacucacuaaaaaaaaacagcagaucacuaggcgaaaacgacgacggaaacaacgaagacaacgaaaaacuacgcaagcccaaacacaagaaacucaaacaacccgcagacggaaacccagaccccaacgcaaaccccaacguagaccccaacgcaaaccccaacguagaccccaacgcaaaucccaacguagacccaaacgcaaaccccaacgcaaacccaaacgcaaacccaaacgcgaacccaaacgcaaacccaaacgcaaacccgaacgccaacccaaacgcaaacccaaacgcuaaccccaacgcaaacccaaacgcaaacccaaacgcaaacccaaacgcaaacccaaacgcaaacccaaacgcaaacccgaacgcaaacccaaacgcaaaccccaacguagacccaaacgccaacccaaacgcaaaccccaacgccaacccaaacgcaaacccaaacgcaaacccaaacgcaaacccaaacgcaaacccaaacgcaaacccaaacgcaaaccccaacgcgaacccaaacgccaacccaaacgcaaacccaaacgcgaacccaaacgccaaccccaacgcaaaccccaacgcaaaccccaacgcaaacccaaacgcaaaccccgccgcuuacauaaaacccggcucggccaauaaaccaaaagacgaacucgacuacgccaacgacauagaaaaaaaaauaugcaaaauggaaaaaugcagcgccgccuacgaaccaucagacaaacacaucaaagaauaccucaacaaaauacaaaacagccucuaaggacuagucccuguucccagagcccacuuuuuuuucuuuuuuugaaauaaaauagccugucuuucagaucucaaaggcucuuuucagagccaccaaaaaaaaaaaaaaaaaaaaaaaaaaaaaaaaaaaaaaaaaaaaaaaaaaaaaaaaaaaaaaaaagaauu

SEQ ID NO: 9260 - RNA, 1270 nt, Artificial Sequence
  mRNA Design a-1 (hSL-A64-N5) comprising derived and/or modified sequence from Pf(3D7)__XP_001351122.1__HsALB_Pf-CSP(19-272)_L(AAY)_Pf-CSP(346-3 75)_L(AAY)_Pf-CSP(310-327)_L(AAY)_PADRE (opt11)
aggagagucccgcagucggcguccagcggcucugcuuguucgugugugugucguugcaggccuuauucaagcuuaccaugaaauggguaacauuuaucucccuccucuuccucuuuuccuccgcauacucacucuuccaagaauaccaaugcuacggaucaagcuccaacacccgcguccuuaacgaacuuaacuacgacaacgccggcaccaacuuauacaacgaacucgagaugaacuacuacggcaaacaagaaaacugguacucccucaaaaaaaacuccagaucccucggcgaaaacgacgacggaaacaacgaagacaacgaaaaacuccgcaaacccaaacacaaaaaacucaaacaacccgcugacggcaacccugaccccaacgccaaccccaacguagaccccaacgccaaucccaacguagacccaaacgccaaccccaacguagaccccaacgccaaccccaacgcaaacccaaacgccaaccccaacgccaaccccaacgcgaacccaaacgccaaccccaacgccaacccuaacgccaacccgaacgccaaccccaacgccaaccccaacgccaaccccaacgcgaaccccaacgcaaaccccaacgccaaccccaacgcaaaccccaacgccaaccccaacgccaaccccaacguagaccccaacgccaacccaaacgccaacccaaacgcaaaccccaacgccaauccaaacgcaaaccccaacgcaaaccccaaugccaacccaaacgccaaccccaacgccaacccaaacgccaacccaaacgccaaccccaacgcaaacccaaacgcaaaccccaacgcaaacccuaacgccaacccaaacgccaacccaaacgcaaaccccaacgcaaaccccgccgccuacaucaaaccaggcuccgccaauaaaccaaaagacgaacucgacuacgcaaaugacauagaaaaaaaaauaugcaaaauggaaaaaugcuccgcagccuacgaacccagcgacaaacauaucaaagaauacuuaaacaaaauccaaaacucccuagccgccuacgccaaauucgucgcagccuggacccucaaagccgccgccuaaggacuagucccuguucccagagcccacuuuuuuuucuuuuuuugaaauaaaauagccugucuuucagaucucaaaggcucuuuucagagccaccaaaaaaaaaaaaaaaaaaaaaaaaaaaaaaaaaaaaaaaaaaaaaaaaaaaaaaaaaaaaaaaaagaauu

SEQ ID NO: 9261 - RNA, 1270 nt, Artificial Sequence
  mRNA Design a-1 (hSL-A64-N5) comprising derived and/or modified sequence from Pf(3D7)__XP_001351122.1__HsALB_Pf-CSP(19-272)_L(AAY)_Pf-CSP(310-3 27)_L(AAY)_Pf-CSP(346-375)_L(AAY)_PADRE (opt11)
aggagagucccgcagucggcguccagcggcucugcuuguucgugugugugucguugcaggccuuauucaagcuuaccaugaaaugggugaccuuuaucucacuccucuuccucuucucaagcgcauacucacucuuccaagaauaccaaugcuacgguucaagcucaaacacaagaguccucaacgaacucaacuacgacaacgccggaaccaaccucuacaacgaacucgaaaugaacuacuacggcaaacaagaaaacugguacucacucaaaaaaaacagcaggucccuaggcgaaaacgacgacggaaacaacgaagacaacgaaaaacuccgcaaaccaaaacacaaaaaacugaaacaacccgcagacggaaacccagaccccaacgcaaacccgaacgucgacccgaacgccaacccaaacguagacccaaacgcaaaccccaacgucgacccaaacgcaaacccaaacgcaaacccaaacgcaaacccgaacgcaaacccaaacgcgaacccaaacgcaaacccaaacgcaaacccaaacgccaacccaaacgcaaacccaaaugcaaaccccaacgcaaacccgaacgcaaacccaaacgcaaaccccaacgcaaacccaaacgcuaacccaaacgcgaaccccaacgcaaacccaaacguggacccaaacgcaaacccaaacgcaaacccaaacgcgaacccgaacgcaaacccaaacgcgaacccaaacgcaaaccccaacgcaaacccaaacgcaaacccaaacgccaacccaaacgcaaacccaaacgcgaaccccaacgccaacccaaacgcaaacccaaacgcaaacccaaacgcaaacccaaacgcaaacccaaacgccaacccaaacgcaaacccagcugccuacgaacccuccgacaaacacaucaaagaguaccugaacaaaauccaaaacucccucgcagccuacaucaagcccggauccgcaaacaaacccaaagacgaacucgacuacgccaacgacauagaaaaaaaaaucugcaaaauggaaaaaugcucagccgcauacgcaaaauucguagcagccuggacccuaaaagcggcagcauaaggacuagucccuguucccagagcccacuuuuuuuucuuuuuuugaaauaaaauagccugucuuucagaucucaaaggcucuuuucagagccaccaaaaaaaaaaaaaaaaaaaaaaaaaaaaaaaaaaaaaaaaaaaaaaaaaaaaaaaaaaaaaaaaagaauu

SEQ ID NO: 9262 - RNA, 1324 nt, Artificial Sequence
  mRNA Design a-1 (hSL-A64-N5) comprising derived and/or modified sequence from Pf(3D7)__XP_001351122.1__HsALB_Pf-CSP(19-272)_L(AAY)_Pf-CSP(310-3 27)_L(AAY)_Pf-CSP(346-375)_L(AAY)_PADRE_L(AAY)_P2 (opt11)
aggagagucccgcagucggcguccagcggcucugcuuguucgugugugugucguugcaggccuuauucaagcuuaccaugaaaugggugaccuucauaucacuauuauuccucuucucaagcgcauacucacucuuccaagaauaccaaugcuacggcuccuccucaaacacgcgcguacucaacgaacuaaacuacgacaacgccggaacaaaccucuacaacgaacuagaaaugaacuacuacggcaaacaagaaaacugguacucccuaaaaaaaaacucaagaucccuaggcgagaaugacgacggcaacaacgaagacaacgaaaaacuccgcaaacccaaacacaaaaaacucaaacaacccgccgacggaaacccagacccaaacgccaacccaaacgucgacccaaacgcaaaccccaacguagaccccaacgcaaacccaaacguagacccaaacgcaaacccaaacgcaaacccaaacgcaaaccccaacgccaacccaaacgcaaacccaaacgccaauccaaacgcaaacccaaaugccaacccaaacgcaaacccaaacgcaaacccaaacgccaaccccaacgcaaacccaaacgcaaacccaaacgccaacccaaacgcaaacccaaacgcaaaccccaacgccaacccgaacguagaccccaacgcaaaccccaacgcaaacccaaacgccaauccaaacgcaaaccccaacgcaaaccccaacgcaaaccccaacgccaauccaaacgccaaccccaacgcgaacccgaacgcaaacccaaacgcaaacccaaacgcaaacccaaacgcaaacccaaacgcaaacccaaacgcaaacccgaacgcaaaccccaacgccaacccaaacgcaaacccagccgcauacgaacccucagacaaacacauaaaagaauaccuaaacaaaauccaaaacucacucgcugccuacaucaaaccaggaagcgcaaacaaacccaaagacgaacucgauuacgccaacgacaucgaaaaaaaaaucugcaaaauggaaaaaugcuccgccgccuacgcaaaauucgucgcagccuggacucuaaaagccgccgcagccgcauaccaauacauaaaagccaacucaaaauucaucggaaucaccgaacuguaaggacuagucccuguucccagagcccacuuuuuuuucuuuuuuugaaauaaaauagccugucuuucagaucucaaaggcucuuuucagagccaccaaaaaaaaaaaaaaaaaaaaaaaaaaaaaaaaaaaaaaaaaaaaaaaaaaaaaaaaaaaaaaaaagaauu

SEQ ID NO: 9263 - RNA, 1288 nt, Artificial Sequence
  mRNA Design a-1 (hSL-A64-N5) comprising derived and/or modified sequence from Pf(3D7)__XP_001351122.1__HsALB_Pf-CSP(19-272)_L(AAY)_Pf-CSP(310-3 27)_Linker (AAY)_Pf-CSP(346-397) (opt11)
aggagagucccgcagucggcguccagcggcucugcuuguucgugugugugucguugcaggccuuauucaagcuuaccaugaaaugggucaccuucaucucacuccuguuccuauucucgagcgcauacucccucuuccaagaauaccagugcuacggcucaagcucaaacacacgcguacucaacgaacuaaacuacgacaacgccggaaccaaccucuacaacgaacuagaaaugaacuacuacggcaaacaagagaacugguacucucuaaagaaaaacagcagaucccugggcgagaacgacgacggaaacaacgaagacaacgagaaacuacgcaaacccaaacacaagaaacuaaaacaacccgcagauggaaacccagauccaaacgcaaacccaaacgucgacccuaacgcaaaccccaacguagaccccaacgcaaaccccaacguagacccaaacgccaacccaaacgccaacccaaacgccaacccgaacgcaaaccccaaugccaacccaaacgccaacccgaacgccaacccaaacgcgaaccccaacgccaacccaaacgcaaacccaaacgcaaacccuaacgcaaaccccaacgccaacccaaaugccaacccaaacgcaaacccaaacgcaaacccaaacgccaaccccaacguagacccaaacgcaaaccccaacgcaaacccaaacgcaaacccaaacgccaacccaaacgcaaacccaaacgcaaacccaaacgcaaacccgaacgccaaccccaacgcaaacccaaacgcaaacccaaacgccaacccaaacgccaacccaaacgcaaaccccaacgcaaaccccaacgccaaccccaacgccaacccaaacgcaaacccaaacgcaaacccagccgcauacgaacccucagacaaacacauaaaagaauaccucaauaaaauccaaaacucacuugcagccuacauaaaaccaggcagcgcgaacaaacccaaagacgaacucgacuacgcgaacgacauagaaaagaaaaucugcaaaauggaaaaaugcucauccgucuucaaugucguaaacucauccauaggccuaaucaugguccucuccuuccuauuccucaacuaaggacuagucccuguucccagagcccacuuuuuuuucuuuuuuugaaauaaaauagccugucuuucagaucucaaaggcucuuuucagagccaccaaaaaaaaaaaaaaaaaaaaaaaaaaaaaaaaaaaaaaaaaaaaaaaaaaaaaaaaaaaaaaaaagaauu

SEQ ID NO: 9264 - RNA, 1985 nt, Artificial Sequence
  mRNA Design a-3 (hSL-A64-N5) comprising derived and/or modified sequence from Pf(3D7)__XP_001351122.1__LumSynt_L(GGS4-GGG)_Pf-CSP(19-397) (opt1)
aggagagggcgcuuggcuugcaaggacccugagcugcggcauugaagcacacccaacccaacucgacugaagucagccucacugaaccggaucugagaaucuucucucucugggcuugccagggcucuccgaaccuagcuagcauccucuucaauuccaacuagaaagcuuaccaugcagaucuacgagggcaagcugaccgccgaggggcuccgcuucggcaucguggccagccgguucaaccacgcgcuggucgaccgccugguggagggggccaucgacgccaucgugcggcacggcgggcgcgaggaggacaucacccucguccgggugcccggcuccugggagaucccgguggccgccggcgagcuggcccgcaaggaggacaucgacgcggucaucgccaucggggugcugauccggggcgccacgccccacuucgacuacaucgccagcgagguguccaaggggcucgcggaccugagccuggagcuccgcaagcccaucaccuucggcgucaucaccgccgacacccuggagcaggccaucgagcgggccgggacgaagcacggcaacaagggcugggaggccgcgcuguccgccaucgagauggccaaccucuucaagagccugcgcggcgggagcggcggguccggcgggagcggcggcuccgggggcgggcuguuccaggaguaccagugcuacggcuccagcuccaacacccgggugcucaacgagcugaacuacgacaacgcggggaccaaccuguacaacgagcucgagaugaacuacuacggcaagcaggagaacugguacagccugaagaagaacucccgcagccugggggagaacgacgacggcaacaacgaggacaacgagaagcuccggaagcccaagcacaagaagcugaagcagccggccgacgggaaccccgaccccaacgccaaccccaacguggacccgaacgccaaccccaacgucgaccccaacgccaaccccaacguggacccgaacgcgaaccccaacgccaaccccaacgccaaccccaacgccaacccgaacgcgaaccccaacgccaaccccaacgccaaccccaacgccaacccgaacgccaaccccaacgcgaaccccaacgccaaccccaacgccaacccgaacgccaaccccaacgccaaccccaacgcgaaccccaacgccaacccgaacgccaaccccaacguggaccccaacgccaaccccaacgccaacccgaacgcgaaccccaacgccaaccccaacgccaacccgaacgccaaccccaacgccaaccccaacgcgaaccccaacgccaacccgaacgccaaccccaacgccaaccccaacgcgaaccccaacgccaacccgaacgccaaccccaacgccaaccccaacgccaaccccaacgcgaacccgaacgccaaccccaacaagaacaaccagggcaacggccaggggcacaacaugcccaacgaccccaaccgcaacgucgacgagaacgccaacgccaacuccgccgugaagaacaacaacaacgaggagccgagcgacaagcacaucaaggaguaccugaacaagauccagaacucccucagcacggaguggucccccugcagcgugaccugcggcaacgggauccagguccggaucaagcccggcuccgcgaacaagcccaaggacgagcuggacuacgccaacgacaucgagaagaagaucugcaagauggagaagugcagcuccguguucaacguggucaacagcuccaucgggcugaucauggugcucagcuuccuguuccugaacugaggacuagucccuguucccagagcccacuuuuuuuucuuuuuuugaaauaaaauagccugucuuucagaucucaaaggcucuuuucagagccaccaaaaaaaaaaaaaaaaaaaaaaaaaaaaaaaaaaaaaaaaaaaaaaaaaaaaaaaaaaaaaaaaagaauu

SEQ ID NO: 9265 - RNA, 1532 nt, Artificial Sequence
  mRNA Design a-3 (hSL-A64-N5) comprising derived and/or modified sequence from Pf(3D7)__XP_001351122.1__HsALB_Pf-CSP(19-397) (opt1)
aggagagggcgcuuggcuugcaaggacccugagcugcggcauugaagcacacccaacccaacucgacugaagucagccucacugaaccggaucugagaaucuucucucucugggcuugccagggcucuccgaaccuagcuagcauccucuucaauuccaacuagaaagcuuaccaugaagugggugaccuucaucagccuccuguuccuguucuccagcgccuacucccuguuccaggaguaccagugcuacggcuccagcuccaacacccgggugcucaacgagcugaacuacgacaacgcggggaccaaccuguacaacgagcucgagaugaacuacuacggcaagcaggagaacugguacagccugaagaagaacucccgcagccugggggagaacgacgacggcaacaacgaggacaacgagaagcuccggaagcccaagcacaagaagcugaagcagccggccgacgggaaccccgaccccaacgccaaccccaacguggacccgaacgccaaccccaacgucgaccccaacgccaaccccaacguggacccgaacgcgaaccccaacgccaaccccaacgccaaccccaacgccaacccgaacgcgaaccccaacgccaaccccaacgccaaccccaacgccaacccgaacgccaaccccaacgcgaaccccaacgccaaccccaacgccaacccgaacgccaaccccaacgccaaccccaacgcgaaccccaacgccaacccgaacgccaaccccaacguggaccccaacgccaaccccaacgccaacccgaacgcgaaccccaacgccaaccccaacgccaacccgaacgccaaccccaacgccaaccccaacgcgaaccccaacgccaacccgaacgccaaccccaacgccaaccccaacgcgaaccccaacgccaacccgaacgccaaccccaacgccaaccccaacgccaaccccaacgcgaacccgaacgccaaccccaacaagaacaaccagggcaacggccaggggcacaacaugcccaacgaccccaaccgcaacgucgacgagaacgccaacgccaacuccgccgugaagaacaacaacaacgaggagccgagcgacaagcacaucaaggaguaccugaacaagauccagaacucccucagcacggaguggucccccugcagcgugaccugcggcaacgggauccagguccggaucaagcccggcuccgcgaacaagcccaaggacgagcuggacuacgccaacgacaucgagaagaagaucugcaagauggagaagugcagcuccguguucaacguggucaacagcuccaucgggcugaucauggugcucagcuuccuguuccugaacugaggacuagucccuguucccagagcccacuuuuuuuucuuuuuuugaaauaaaauagccugucuuucagaucucaaaggcucuuuucagagccaccaaaaaaaaaaaaaaaaaaaaaaaaaaaaaaaaaaaaaaaaaaaaaaaaaaaaaaaaaaaaaaaaagaauu

SEQ ID NO: 9266 - RNA, 1847 nt, Artificial Sequence
  mRNA Design a-3 (hSL-A64-N5) comprising derived and/or modified sequence from Pf(3D7)__XP_001351122.1__HsALB_Pf-CSP(19-272)_L(PVTN)_HBsAg (opt1)
aggagagggcgcuuggcuugcaaggacccugagcugcggcauugaagcacacccaacccaacucgacugaagucagccucacugaaccggaucugagaaucuucucucucugggcuugccagggcucuccgaaccuagcuagcauccucuucaauuccaacuagaaagcuuaccaugaagugggugaccuucaucagccugcucuuccuguucuccagcgccuacucccuguuccaggaguaccagugcuacggcuccagcuccaacacccgggugcucaacgagcugaacuacgacaacgcggggaccaaccuguacaacgagcucgagaugaacuacuacggcaagcaggagaacugguacagccugaagaagaacucccgcagccugggggagaacgacgacggcaacaacgaggacaacgagaagcuccggaagcccaagcacaagaagcugaagcagccggccgacgggaaccccgaccccaacgccaaccccaacguggacccgaacgccaaccccaacgucgaccccaacgccaaccccaacguggacccgaacgcgaaccccaacgccaaccccaacgccaaccccaacgccaacccgaacgcgaaccccaacgccaaccccaacgccaaccccaacgccaacccgaacgccaaccccaacgcgaaccccaacgccaaccccaacgccaacccgaacgccaaccccaacgccaaccccaacgcgaaccccaacgccaacccgaacgccaaccccaacguggaccccaacgccaaccccaacgccaacccgaacgcgaaccccaacgccaaccccaacgccaacccgaacgccaaccccaacgccaaccccaacgcgaaccccaacgccaacccgaacgccaaccccaacgccaaccccaacgcgaaccccaacgccaacccgaacgccaaccccaacgccaaccccaacgccaaccccaacgcgaacccgaacgccaaccccccggugacgaacauggagaacaucaccagcggcuuccuggggccccuccuggugcugcaggccggcuucuuccuccugacccgcauccugaccaucccgcagucccucgacagcugguggaccucccugaacuuccucgggggcagccccgucugccuggggcagaacucccagagccccaccuccaaccacagccccaccuccugcccgcccaucugccccggcuaccgguggaugugccugcgccgguucaucaucuuccuguucauccuccugcugugccucaucuuccugcuggugcuccuggacuaccagggcaugcugcccgugugcccgcucauccccgggagcacgaccaccaacaccggccccugcaagacgugcaccacccccgcccaggggaacuccauguucccgagcugcugcugcaccaagcccacggacggcaacugcacgugcauccccauccccuccagcugggcguucgccaaguaccugugggagugggccuccguccgcuucagcuggcugucccuccuggugccguucgugcagugguucgucgggcugagccccaccguguggcucuccgccaucuggaugaugugguacuggggccccagccuguacagcaucgugucccccuucaucccgcugcuccccaucuucuucugccugugggucuacaucugaggacuagucccuguucccagagcccacuuuuuuuucuuuuuuugaaauaaaauagccugucuuucagaucucaaaggcucuuuucagagccaccaaaaaaaaaaaaaaaaaaaaaaaaaaaaaaaaaaaaaaaaaaaaaaaaaaaaaaaaaaaaaaaaagaauu

SEQ ID NO: 9267 - RNA, 1964 nt, Artificial Sequence
  mRNA Design a-3 (hSL-A64-N5) comprising derived and/or modified sequence from Pf(3D7)__XP_001351122.1__HsALB_Pf-CSP(19-272)_L(AAY)_Pf-CSP(346-3 65)_L(AAY)_PADRE_L(PVTN)_HBsAg (opt1)
aggagagggcgcuuggcuugcaaggacccugagcugcggcauugaagcacacccaacccaacucgacugaagucagccucacugaaccggaucugagaaucuucucucucugggcuugccagggcucuccgaaccuagcuagcauccucuucaauuccaacuagaaagcuuaccaugaagugggugaccuucaucagccugcucuuccuguucuccagcgccuacucccuguuccaggaguaccagugcuacggcuccagcuccaacacccgggugcucaacgagcugaacuacgacaacgcggggaccaaccuguacaacgagcucgagaugaacuacuacggcaagcaggagaacugguacagccugaagaagaacucccgcagccugggggagaacgacgacggcaacaacgaggacaacgagaagcuccggaagcccaagcacaagaagcugaagcagccggccgacgggaaccccgaccccaacgccaaccccaacguggacccgaacgccaaccccaacgucgaccccaacgccaaccccaacguggacccgaacgcgaaccccaacgccaaccccaacgccaaccccaacgccaacccgaacgcgaaccccaacgccaaccccaacgccaaccccaacgccaacccgaacgccaaccccaacgcgaaccccaacgccaaccccaacgccaacccgaacgccaaccccaacgccaaccccaacgcgaaccccaacgccaacccgaacgccaaccccaacguggaccccaacgccaaccccaacgccaacccgaacgcgaaccccaacgccaaccccaacgccaacccgaacgccaaccccaacgccaaccccaacgcgaaccccaacgccaacccgaacgccaaccccaacgccaaccccaacgcgaaccccaacgccaacccgaacgccaaccccaacgccaaccccaacgccaaccccaacgcgaacccgaacgccaaccccgccgcguauaucaagcccggcuccgcgaacaagcccaaggacgagcuggacuacgccaacgacaucgaggcggccuacgccaaguucguggccgccuggacccugaaggcggccgccccggugacgaacauggagaacaucaccagcggcuuccuggggccccuccuggugcugcaggccggcuucuuccuccugacccgcauccugaccaucccgcagucccucgacagcugguggaccucccugaacuuccucgggggcagccccgucugccuggggcagaacucccagagccccaccuccaaccacagccccaccuccugcccgcccaucugccccggcuaccgguggaugugccugcgccgguucaucaucuuccuguucauccuccugcugugccucaucuuccugcuggugcuccuggacuaccagggcaugcugcccgugugcccgcucauccccgggagcacgaccaccaacaccggccccugcaagacgugcaccacccccgcccaggggaacuccauguucccgagcugcugcugcaccaagcccacggacggcaacugcacgugcauccccauccccuccagcugggcguucgccaaguaccugugggagugggccuccguccgcuucagcuggcugucccuccuggugccguucgugcagugguucgucgggcugagccccaccguguggcucuccgccaucuggaugaugugguacuggggccccagccuguacagcaucgugucccccuucaucccgcugcuccccaucuucuucugccugugggucuacaucugaggacuagucccuguucccagagcccacuuuuuuuucuuuuuuugaaauaaaauagccugucuuucagaucucaaaggcucuuuucagagccaccaaaaaaaaaaaaaaaaaaaaaaaaaaaaaaaaaaaaaaaaaaaaaaaaaaaaaaaaaaaaaaaaagaauu

SEQ ID NO: 9268 - RNA, 1964 nt, Artificial Sequence
  mRNA Design a-3 (hSL-A64-N5) comprising derived and/or modified sequence from Pf(3D7)__XP_001351122.1__HsALB_Pf-CSP(19-272)_L(AAY)_Pf-CSP(346-3 65)_L(AAY)_PADRE_L(PVTN)_HBsAg (opt1)
aggagagggcgcuuggcuugcaaggacccugagcugcggcauugaagcacacccaacccaacucgacugaagucagccucacugaaccggaucugagaaucuucucucucugggcuugccagggcucuccgaaccuagcuagcauccucuucaauuccaacuagaaagcuuaccaugaagugggugaccuucaucagccuccuguuccuguucuccagcgccuacucccuguuccaggaguaccagugcuacggcuccagcuccaacacccgggugcucaacgagcugaacuacgacaacgcggggaccaaccuguacaacgagcucgagaugaacuacuacggcaagcaggagaacugguacagccugaagaagaacucccgcagccugggggagaacgacgacggcaacaacgaggacaacgagaagcuccggaagcccaagcacaagaagcugaagcagccggccgacgggaaccccgaccccaacgccaaccccaacguggacccgaacgccaaccccaacgucgaccccaacgccaaccccaacguggacccgaacgcgaaccccaacgccaaccccaacgccaaccccaacgccaacccgaacgcgaaccccaacgccaaccccaacgccaaccccaacgccaacccgaacgccaaccccaacgcgaaccccaacgccaaccccaacgccaacccgaacgccaaccccaacgccaaccccaacgcgaaccccaacgccaacccgaacgccaaccccaacguggaccccaacgccaaccccaacgccaacccgaacgcgaaccccaacgccaaccccaacgccaacccgaacgccaaccccaacgccaaccccaacgcgaaccccaacgccaacccgaacgccaaccccaacgccaaccccaacgcgaaccccaacgccaacccgaacgccaaccccaacgccaaccccaacgccaaccccaacgcgaacccgaacgccaaccccgccgcguauaucaagcccggcuccgcgaacaagcccaaggacgagcuggacuacgccaacgacaucgaggcggccuacgccaaguucguggccgccuggacccugaaggcggccgccccggugacgaacauggagaacaucaccagcggcuuccuggggccccuccuggugcugcaggccggcuucuuccuccugacccgcauccugaccaucccgcagucccucgacagcugguggaccucccugaacuuccucgggggcagccccgucugccuggggcagaacucccagagccccaccuccaaccacagccccaccuccugcccgcccaucugccccggcuaccgguggaugugccugcgccgguucaucaucuuccuguucauccuccugcugugccucaucuuccugcuggugcuccuggacuaccagggcaugcugcccgugugcccgcucauccccgggagcacgaccaccaacaccggccccugcaagacgugcaccacccccgcccaggggaacuccauguucccgagcugcugcugcaccaagcccacggacggcaacugcacgugcauccccauccccuccagcugggcguucgccaaguaccugugggagugggccuccguccgcuucagcuggcugucccuccuggugccguucgugcagugguucgucgggcugagccccaccguguggcucuccgccaucuggaugaugugguacuggggccccagccuguacagcaucgugucccccuucaucccgcugcuccccaucuucuucugccugugggucuacaucugaggacuagucccuguucccagagcccacuuuuuuuucuuuuuuugaaauaaaauagccugucuuucagaucucaaaggcucuuuucagagccaccaaaaaaaaaaaaaaaaaaaaaaaaaaaaaaaaaaaaaaaaaaaaaaaaaaaaaaaaaaaaaaaaagaauu

SEQ ID NO: 9269 - RNA, 2183 nt, Artificial Sequence
  mRNA Design a-3 (hSL-A64-N5) comprising derived and/or modified sequence from Pf(3D7)__XP_001351122.1__HsALB_Pf-CSP(19-384)_L(PVTN)_HBsAg (opt1)
aggagagggcgcuuggcuugcaaggacccugagcugcggcauugaagcacacccaacccaacucgacugaagucagccucacugaaccggaucugagaaucuucucucucugggcuugccagggcucuccgaaccuagcuagcauccucuucaauuccaacuagaaagcuuaccaugaagugggugaccuucaucagccugcucuuccuguucuccagcgccuacucccuguuccaggaguaccagugcuacggcuccagcuccaacacccgggugcucaacgagcugaacuacgacaacgcggggaccaaccuguacaacgagcucgagaugaacuacuacggcaagcaggagaacugguacagccugaagaagaacucccgcagccugggggagaacgacgacggcaacaacgaggacaacgagaagcuccggaagcccaagcacaagaagcugaagcagccggccgacgggaaccccgaccccaacgccaaccccaacguggacccgaacgccaaccccaacgucgaccccaacgccaaccccaacguggacccgaacgcgaaccccaacgccaaccccaacgccaaccccaacgccaacccgaacgcgaaccccaacgccaaccccaacgccaaccccaacgccaacccgaacgccaaccccaacgcgaaccccaacgccaaccccaacgccaacccgaacgccaaccccaacgccaaccccaacgcgaaccccaacgccaacccgaacgccaaccccaacguggaccccaacgccaaccccaacgccaacccgaacgcgaaccccaacgccaaccccaacgccaacccgaacgccaaccccaacgccaaccccaacgcgaaccccaacgccaacccgaacgccaaccccaacgccaaccccaacgcgaaccccaacgccaacccgaacgccaaccccaacgccaaccccaacgccaaccccaacgcgaacccgaacgccaaccccaacaagaacaaccagggcaacggccaggggcacaacaugcccaacgaccccaaccgcaacgucgacgagaacgccaacgccaacuccgccgugaagaacaacaacaacgaggagccgagcgacaagcacaucaaggaguaccugaacaagauccagaacucccucagcacggaguggucccccugcagcgugaccugcggcaacgggauccagguccggaucaagcccggcuccgcgaacaagcccaaggacgagcuggacuacgccaacgacaucgagaagaagaucugcaagauggagaagugcagcuccguguucaacguggucaacagcuccccggugacgaacauggagaacaucaccagcggcuuccuggggccccuccuggugcugcaggccggcuucuuccuccugacccgcauccugaccaucccgcagucccucgacagcugguggaccucccugaacuuccucgggggcagccccgucugccuggggcagaacucccagagccccaccuccaaccacagccccaccuccugcccgcccaucugccccggcuaccgguggaugugccugcgccgguucaucaucuuccuguucauccuccugcugugccucaucuuccugcuggugcuccuggacuaccagggcaugcugcccgugugcccgcucauccccgggagcacgaccaccaacaccggccccugcaagacgugcaccacccccgcccaggggaacuccauguucccgagcugcugcugcaccaagcccacggacggcaacugcacgugcauccccauccccuccagcugggcguucgccaaguaccugugggagugggccuccguccgcuucagcuggcugucccuccuggugccguucgugcagugguucgucgggcugagccccaccguguggcucuccgccaucuggaugaugugguacuggggccccagccuguacagcaucgugucccccuucaucccgcugcuccccaucuucuucugccugugggucuacaucugaggacuagucccuguucccagagcccacuuuuuuuucuuuuuuugaaauaaaauagccugucuuucagaucucaaaggcucuuuucagagccaccaaaaaaaaaaaaaaaaaaaaaaaaaaaaaaaaaaaaaaaaaaaaaaaaaaaaaaaaaaaaaaaaagaauu

SEQ ID NO: 9270 - RNA, 2183 nt, Artificial Sequence
  mRNA Design a-3 (hSL-A64-N5) comprising derived and/or modified sequence from Pf(3D7)__XP_001351122.1__HsALB_Pf-CSP(19-384)_L(PVTN)_HBsAg (opt1)
aggagagggcgcuuggcuugcaaggacccugagcugcggcauugaagcacacccaacccaacucgacugaagucagccucacugaaccggaucugagaaucuucucucucugggcuugccagggcucuccgaaccuagcuagcauccucuucaauuccaacuagaaagcuuaccaugaagugggugaccuucaucagccuccuguuccuguucuccagcgccuacucccuguuccaggaguaccagugcuacggcuccagcuccaacacccgggugcucaacgagcugaacuacgacaacgcggggaccaaccuguacaacgagcucgagaugaacuacuacggcaagcaggagaacugguacagccugaagaagaacucccgcagccugggggagaacgacgacggcaacaacgaggacaacgagaagcuccggaagcccaagcacaagaagcugaagcagccggccgacgggaaccccgaccccaacgccaaccccaacguggacccgaacgccaaccccaacgucgaccccaacgccaaccccaacguggacccgaacgcgaaccccaacgccaaccccaacgccaaccccaacgccaacccgaacgcgaaccccaacgccaaccccaacgccaaccccaacgccaacccgaacgccaaccccaacgcgaaccccaacgccaaccccaacgccaacccgaacgccaaccccaacgccaaccccaacgcgaaccccaacgccaacccgaacgccaaccccaacguggaccccaacgccaaccccaacgccaacccgaacgcgaaccccaacgccaaccccaacgccaacccgaacgccaaccccaacgccaaccccaacgcgaaccccaacgccaacccgaacgccaaccccaacgccaaccccaacgcgaaccccaacgccaacccgaacgccaaccccaacgccaaccccaacgccaaccccaacgcgaacccgaacgccaaccccaacaagaacaaccagggcaacggccaggggcacaacaugcccaacgaccccaaccgcaacgucgacgagaacgccaacgccaacuccgccgugaagaacaacaacaacgaggagccgagcgacaagcacaucaaggaguaccugaacaagauccagaacucccucagcacggaguggucccccugcagcgugaccugcggcaacgggauccagguccggaucaagcccggcuccgcgaacaagcccaaggacgagcuggacuacgccaacgacaucgagaagaagaucugcaagauggagaagugcagcuccguguucaacguggucaacagcuccccggugacgaacauggagaacaucaccagcggcuuccuggggccccuccuggugcugcaggccggcuucuuccuccugacccgcauccugaccaucccgcagucccucgacagcugguggaccucccugaacuuccucgggggcagccccgucugccuggggcagaacucccagagccccaccuccaaccacagccccaccuccugcccgcccaucugccccggcuaccgguggaugugccugcgccgguucaucaucuuccuguucauccuccugcugugccucaucuuccugcuggugcuccuggacuaccagggcaugcugcccgugugcccgcucauccccgggagcacgaccaccaacaccggccccugcaagacgugcaccacccccgcccaggggaacuccauguucccgagcugcugcugcaccaagcccacggacggcaacugcacgugcauccccauccccuccagcugggcguucgccaaguaccugugggagugggccuccguccgcuucagcuggcugucccuccuggugccguucgugcagugguucgucgggcugagccccaccguguggcucuccgccaucuggaugaugugguacuggggccccagccuguacagcaucgugucccccuucaucccgcugcuccccaucuucuucugccugugggucuacaucugaggacuagucccuguucccagagcccacuuuuuuuucuuuuuuugaaauaaaauagccugucuuucagaucucaaaggcucuuuucagagccaccaaaaaaaaaaaaaaaaaaaaaaaaaaaaaaaaaaaaaaaaaaaaaaaaaaaaaaaaaaaaaaaaagaauu

SEQ ID NO: 9271 - RNA, 2000 nt, Artificial Sequence
  mRNA Design a-3 (hSL-A64-N5) comprising derived and/or modified sequence from Pf(3D7)__XP_001351122.1__HsALB_Pf-CSP(19-384)_L(SGG)_Ferritin (opt1)
aggagagggcgcuuggcuugcaaggacccugagcugcggcauugaagcacacccaacccaacucgacugaagucagccucacugaaccggaucugagaaucuucucucucugggcuugccagggcucuccgaaccuagcuagcauccucuucaauuccaacuagaaagcuuaccaugaagugggugaccuucaucagccugcucuuccuguucuccagcgccuacucccuguuccaggaguaccagugcuacggcuccagcuccaacacccgggugcucaacgagcugaacuacgacaacgcggggaccaaccuguacaacgagcucgagaugaacuacuacggcaagcaggagaacugguacagccugaagaagaacucccgcagccugggggagaacgacgacggcaacaacgaggacaacgagaagcuccggaagcccaagcacaagaagcugaagcagccggccgacgggaaccccgaccccaacgccaaccccaacguggacccgaacgccaaccccaacgucgaccccaacgccaaccccaacguggacccgaacgcgaaccccaacgccaaccccaacgccaaccccaacgccaacccgaacgcgaaccccaacgccaaccccaacgccaaccccaacgccaacccgaacgccaaccccaacgcgaaccccaacgccaaccccaacgccaacccgaacgccaaccccaacgccaaccccaacgcgaaccccaacgccaacccgaacgccaaccccaacguggaccccaacgccaaccccaacgccaacccgaacgcgaaccccaacgccaaccccaacgccaacccgaacgccaaccccaacgccaaccccaacgcgaaccccaacgccaacccgaacgccaaccccaacgccaaccccaacgcgaaccccaacgccaacccgaacgccaaccccaacgccaaccccaacgccaaccccaacgcgaacccgaacgccaaccccaacaagaacaaccagggcaacggccaggggcacaacaugcccaacgaccccaaccgcaacgucgacgagaacgccaacgccaacuccgccgugaagaacaacaacaacgaggagccgagcgacaagcacaucaaggaguaccugaacaagauccagaacucccucagcacggaguggucccccugcagcgugaccugcggcaacgggauccagguccggaucaagcccggcuccgcgaacaagcccaaggacgagcuggacuacgccaacgacaucgagaagaagaucugcaagauggagaagugcagcuccguguucaacguggucaacagcuccagcggcgggcugagcaaggacaucaucaagcuccugaacgagcaggugaacaaggagaugaacuccagcaaccuguacauguccaugagcuccuggugcuacacccacagccucgacggcgccgggcuguuccuguucgaccacgccgcggaggaguacgagcacgccaagaagcucaucaucuuccugaacgagaacaacguccccgugcagcugaccuccaucagcgccccggagcacaaguucgagggccucacgcagaucuuccagaaggccuacgagcacgagcagcacaucuccgagagcaucaacaacaucguggaccacgccaucaaguccaaggaccacgcgaccuucaacuuccugcagugguacgucgccgagcagcacgaggaggaggugcuguucaaggacauccucgacaagaucgagcugaucgggaacgagaaccacggccuguaccucgccgaccaguacgugaaggggaucgccaagagccgcaaguccugaggacuagucccuguucccagagcccacuuuuuuuucuuuuuuugaaauaaaauagccugucuuucagaucucaaaggcucuuuucagagccaccaaaaaaaaaaaaaaaaaaaaaaaaaaaaaaaaaaaaaaaaaaaaaaaaaaaaaaaaaaaaaaaaagaauu

SEQ ID NO: 9272 - RNA, 2000 nt, Artificial Sequence
  mRNA Design a-3 (hSL-A64-N5) comprising derived and/or modified sequence from Pf(3D7)__XP_001351122.1__HsALB_Pf-CSP(19-384)_L(SGG)_Ferritin (opt1)
aggagagggcgcuuggcuugcaaggacccugagcugcggcauugaagcacacccaacccaacucgacugaagucagccucacugaaccggaucugagaaucuucucucucugggcuugccagggcucuccgaaccuagcuagcauccucuucaauuccaacuagaaagcuuaccaugaagugggugaccuucaucagccuccuguuccuguucuccagcgccuacucccuguuccaggaguaccagugcuacggcuccagcuccaacacccgggugcucaacgagcugaacuacgacaacgcggggaccaaccuguacaacgagcucgagaugaacuacuacggcaagcaggagaacugguacagccugaagaagaacucccgcagccugggggagaacgacgacggcaacaacgaggacaacgagaagcuccggaagcccaagcacaagaagcugaagcagccggccgacgggaaccccgaccccaacgccaaccccaacguggacccgaacgccaaccccaacgucgaccccaacgccaaccccaacguggacccgaacgcgaaccccaacgccaaccccaacgccaaccccaacgccaacccgaacgcgaaccccaacgccaaccccaacgccaaccccaacgccaacccgaacgccaaccccaacgcgaaccccaacgccaaccccaacgccaacccgaacgccaaccccaacgccaaccccaacgcgaaccccaacgccaacccgaacgccaaccccaacguggaccccaacgccaaccccaacgccaacccgaacgcgaaccccaacgccaaccccaacgccaacccgaacgccaaccccaacgccaaccccaacgcgaaccccaacgccaacccgaacgccaaccccaacgccaaccccaacgcgaaccccaacgccaacccgaacgccaaccccaacgccaaccccaacgccaaccccaacgcgaacccgaacgccaaccccaacaagaacaaccagggcaacggccaggggcacaacaugcccaacgaccccaaccgcaacgucgacgagaacgccaacgccaacuccgccgugaagaacaacaacaacgaggagccgagcgacaagcacaucaaggaguaccugaacaagauccagaacucccucagcacggaguggucccccugcagcgugaccugcggcaacgggauccagguccggaucaagcccggcuccgcgaacaagcccaaggacgagcuggacuacgccaacgacaucgagaagaagaucugcaagauggagaagugcagcuccguguucaacguggucaacagcuccagcggcgggcugagcaaggacaucaucaagcuccugaacgagcaggugaacaaggagaugaacuccagcaaccuguacauguccaugagcuccuggugcuacacccacagccucgacggcgccgggcuguuccuguucgaccacgccgcggaggaguacgagcacgccaagaagcucaucaucuuccugaacgagaacaacguccccgugcagcugaccuccaucagcgccccggagcacaaguucgagggccucacgcagaucuuccagaaggccuacgagcacgagcagcacaucuccgagagcaucaacaacaucguggaccacgccaucaaguccaaggaccacgcgaccuucaacuuccugcagugguacgucgccgagcagcacgaggaggaggugcuguucaaggacauccucgacaagaucgagcugaucgggaacgagaaccacggccuguaccucgccgaccaguacgugaaggggaucgccaagagccgcaaguccugaggacuagucccuguucccagagcccacuuuuuuuucuuuuuuugaaauaaaauagccugucuuucagaucucaaaggcucuuuucagagccaccaaaaaaaaaaaaaaaaaaaaaaaaaaaaaaaaaaaaaaaaaaaaaaaaaaaaaaaaaaaaaaaaagaauu

SEQ ID NO: 9273 - RNA, 1961 nt, Artificial Sequence
  mRNA Design a-3 (hSL-A64-N5) comprising derived and/or modified sequence from Pf(3D7)__XP_001351122.1__HsALB_Pf-CSP(93-384)_L(PVTN)_HBsAg (opt1)
aggagagggcgcuuggcuugcaaggacccugagcugcggcauugaagcacacccaacccaacucgacugaagucagccucacugaaccggaucugagaaucuucucucucugggcuugccagggcucuccgaaccuagcuagcauccucuucaauuccaacuagaaagcuuaccaugaagugggugaccuucaucagccugcucuuccuguucuccagcgccuacuccaagcugaagcagccggccgacgggaaccccgaccccaacgccaaccccaacguggacccgaacgccaaccccaacgucgaccccaacgccaaccccaacguggacccgaacgcgaaccccaacgccaaccccaacgccaaccccaacgccaacccgaacgcgaaccccaacgccaaccccaacgccaaccccaacgccaacccgaacgccaaccccaacgcgaaccccaacgccaaccccaacgccaacccgaacgccaaccccaacgccaaccccaacgcgaaccccaacgccaacccgaacgccaaccccaacguggaccccaacgccaaccccaacgccaacccgaacgcgaaccccaacgccaaccccaacgccaacccgaacgccaaccccaacgccaaccccaacgcgaaccccaacgccaacccgaacgccaaccccaacgccaaccccaacgcgaaccccaacgccaacccgaacgccaaccccaacgccaaccccaacgccaaccccaacgcgaacccgaacgccaaccccaacaagaacaaccagggcaacggccaggggcacaacaugcccaacgaccccaaccgcaacgucgacgagaacgccaacgccaacuccgccgugaagaacaacaacaacgaggagccgagcgacaagcacaucaaggaguaccugaacaagauccagaacucccucagcacggaguggucccccugcagcgugaccugcggcaacgggauccagguccggaucaagcccggcuccgcgaacaagcccaaggacgagcuggacuacgccaacgacaucgagaagaagaucugcaagauggagaagugcagcuccguguucaacguggucaacagcuccccggugacgaacauggagaacaucaccagcggcuuccuggggccccuccuggugcugcaggccggcuucuuccuccugacccgcauccugaccaucccgcagucccucgacagcugguggaccucccugaacuuccucgggggcagccccgucugccuggggcagaacucccagagccccaccuccaaccacagccccaccuccugcccgcccaucugccccggcuaccgguggaugugccugcgccgguucaucaucuuccuguucauccuccugcugugccucaucuuccugcuggugcuccuggacuaccagggcaugcugcccgugugcccgcucauccccgggagcacgaccaccaacaccggccccugcaagacgugcaccacccccgcccaggggaacuccauguucccgagcugcugcugcaccaagcccacggacggcaacugcacgugcauccccauccccuccagcugggcguucgccaaguaccugugggagugggccuccguccgcuucagcuggcugucccuccuggugccguucgugcagugguucgucgggcugagccccaccguguggcucuccgccaucuggaugaugugguacuggggccccagccuguacagcaucgugucccccuucaucccgcugcuccccaucuucuucugccugugggucuacaucugaggacuagucccuguucccagagcccacuuuuuuuucuuuuuuugaaauaaaauagccugucuuucagaucucaaaggcucuuuucagagccaccaaaaaaaaaaaaaaaaaaaaaaaaaaaaaaaaaaaaaaaaaaaaaaaaaaaaaaaaaaaaaaaaagaauu

SEQ ID NO: 9274 - RNA, 1961 nt, Artificial Sequence
  mRNA Design a-3 (hSL-A64-N5) comprising derived and/or modified sequence from Pf(3D7)__XP_001351122.1__HsALB_Pf-CSP(93-384)_L(PVTN)_HBsAg (opt1)
aggagagggcgcuuggcuugcaaggacccugagcugcggcauugaagcacacccaacccaacucgacugaagucagccucacugaaccggaucugagaaucuucucucucugggcuugccagggcucuccgaaccuagcuagcauccucuucaauuccaacuagaaagcuuaccaugaagugggugaccuucaucagccuccuguuccuguucuccagcgccuacuccaagcugaagcagccggccgacgggaaccccgaccccaacgccaaccccaacguggacccgaacgccaaccccaacgucgaccccaacgccaaccccaacguggacccgaacgcgaaccccaacgccaaccccaacgccaaccccaacgccaacccgaacgcgaaccccaacgccaaccccaacgccaaccccaacgccaacccgaacgccaaccccaacgcgaaccccaacgccaaccccaacgccaacccgaacgccaaccccaacgccaaccccaacgcgaaccccaacgccaacccgaacgccaaccccaacguggaccccaacgccaaccccaacgccaacccgaacgcgaaccccaacgccaaccccaacgccaacccgaacgccaaccccaacgccaaccccaacgcgaaccccaacgccaacccgaacgccaaccccaacgccaaccccaacgcgaaccccaacgccaacccgaacgccaaccccaacgccaaccccaacgccaaccccaacgcgaacccgaacgccaaccccaacaagaacaaccagggcaacggccaggggcacaacaugcccaacgaccccaaccgcaacgucgacgagaacgccaacgccaacuccgccgugaagaacaacaacaacgaggagccgagcgacaagcacaucaaggaguaccugaacaagauccagaacucccucagcacggaguggucccccugcagcgugaccugcggcaacgggauccagguccggaucaagcccggcuccgcgaacaagcccaaggacgagcuggacuacgccaacgacaucgagaagaagaucugcaagauggagaagugcagcuccguguucaacguggucaacagcuccccggugacgaacauggagaacaucaccagcggcuuccuggggccccuccuggugcugcaggccggcuucuuccuccugacccgcauccugaccaucccgcagucccucgacagcugguggaccucccugaacuuccucgggggcagccccgucugccuggggcagaacucccagagccccaccuccaaccacagccccaccuccugcccgcccaucugccccggcuaccgguggaugugccugcgccgguucaucaucuuccuguucauccuccugcugugccucaucuuccugcuggugcuccuggacuaccagggcaugcugcccgugugcccgcucauccccgggagcacgaccaccaacaccggccccugcaagacgugcaccacccccgcccaggggaacuccauguucccgagcugcugcugcaccaagcccacggacggcaacugcacgugcauccccauccccuccagcugggcguucgccaaguaccugugggagugggccuccguccgcuucagcuggcugucccuccuggugccguucgugcagugguucgucgggcugagccccaccguguggcucuccgccaucuggaugaugugguacuggggccccagccuguacagcaucgugucccccuucaucccgcugcuccccaucuucuucugccugugggucuacaucugaggacuagucccuguucccagagcccacuuuuuuuucuuuuuuugaaauaaaauagccugucuuucagaucucaaaggcucuuuucagagccaccaaaaaaaaaaaaaaaaaaaaaaaaaaaaaaaaaaaaaaaaaaaaaaaaaaaaaaaaaaaaaaaaagaauu

SEQ ID NO: 9275 - RNA, 1622 nt, Artificial Sequence; identical to SEQ ID NO: 6830
  mRNA Design a-3 (hSL-A64-N5) comprising derived and/or modified sequence from Pf(3D7)__XP_001351122.1__HsALB_Pf-CSP(199-377)_L(PVTN)_HBsAg (opt1)

SEQ ID NO: 9276 - RNA, 1319 nt, Artificial Sequence
  mRNA Design a-3 (hSL-A64-N5) comprising derived and/or modified sequence from Pf(3D7)__XP_001351122.1__HsALB_Pf-CSP(19-272)_L(AAY)_Pf-CSP(310-3 27)_L(AAY)_Pf-CSP(346-375) (opt1)
aggagagggcgcuuggcuugcaaggacccugagcugcggcauugaagcacacccaacccaacucgacugaagucagccucacugaaccggaucugagaaucuucucucucugggcuugccagggcucuccgaaccuagcuagcauccucuucaauuccaacuagaaagcuuaccaugaagugggugaccuucaucagccuccuguuccuguucuccagcgccuacucccuguuccaggaguaccagugcuacggcuccagcuccaacacccgggugcucaacgagcugaacuacgacaacgcggggaccaaccuguacaacgagcucgagaugaacuacuacggcaagcaggagaacugguacagccugaagaagaacucccgcagccugggggagaacgacgacggcaacaacgaggacaacgagaagcuccggaagcccaagcacaagaagcugaagcagccggccgacgggaaccccgaccccaacgccaaccccaacguggacccgaacgccaaccccaacgucgaccccaacgccaaccccaacguggacccgaacgcgaaccccaacgccaaccccaacgccaaccccaacgccaacccgaacgcgaaccccaacgccaaccccaacgccaaccccaacgccaacccgaacgccaaccccaacgcgaaccccaacgccaaccccaacgccaacccgaacgccaaccccaacgccaaccccaacgcgaaccccaacgccaacccgaacgccaaccccaacguggaccccaacgccaaccccaacgccaacccgaacgcgaaccccaacgccaaccccaacgccaacccgaacgccaaccccaacgccaaccccaacgcgaaccccaacgccaacccgaacgccaaccccaacgccaaccccaacgcgaaccccaacgccaacccgaacgccaaccccaacgccaaccccaacgccaaccccaacgcgaacccgaacgccaaccccgccgcguaugagccgagcgacaagcacaucaaggaguaccugaacaagauccagaacucccucgcggccuacaucaagcccggcuccgcgaacaagcccaaggacgagcuggacuacgccaacgacaucgagaagaagaucugcaagauggagaagugcagcugaggacuagucccuguucccagagcccacuuuuuuuucuuuuuuugaaauaaaauagccugucuuucagaucucaaaggcucuuuucagagccaccaaaaaaaaaaaaaaaaaaaaaaaaaaaaaaaaaaaaaaaaaaaaaaaaaaaaaaaaaaaaaaaaagaauu

SEQ ID NO: 9277 - RNA, 1319 nt, Artificial Sequence
  mRNA Design a-3 (hSL-A64-N5) comprising derived and/or modified sequence from Pf(3D7)__XP_001351122.1__HsALB_Pf-CSP(19-272)_L(AAY)_Pf-CSP(346-3 75)_L(AAY)_Pf-CSP(310-327) (opt1)
aggagagggcgcuuggcuugcaaggacccugagcugcggcauugaagcacacccaacccaacucgacugaagucagccucacugaaccggaucugagaaucuucucucucugggcuugccagggcucuccgaaccuagcuagcauccucuucaauuccaacuagaaagcuuaccaugaagugggugaccuucaucagccuccuguuccuguucuccagcgccuacucccuguuccaggaguaccagugcuacggcuccagcuccaacacccgggugcucaacgagcugaacuacgacaacgcggggaccaaccuguacaacgagcucgagaugaacuacuacggcaagcaggagaacugguacagccugaagaagaacucccgcagccugggggagaacgacgacggcaacaacgaggacaacgagaagcuccggaagcccaagcacaagaagcugaagcagccggccgacgggaaccccgaccccaacgccaaccccaacguggacccgaacgccaaccccaacgucgaccccaacgccaaccccaacguggacccgaacgcgaaccccaacgccaaccccaacgccaaccccaacgccaacccgaacgcgaaccccaacgccaaccccaacgccaaccccaacgccaacccgaacgccaaccccaacgcgaaccccaacgccaaccccaacgccaacccgaacgccaaccccaacgccaaccccaacgcgaaccccaacgccaacccgaacgccaaccccaacguggaccccaacgccaaccccaacgccaacccgaacgcgaaccccaacgccaaccccaacgccaacccgaacgccaaccccaacgccaaccccaacgcgaaccccaacgccaacccgaacgccaaccccaacgccaaccccaacgcgaaccccaacgccaacccgaacgccaaccccaacgccaaccccaacgccaaccccaacgcgaacccgaacgccaaccccgcggccuacaucaagcccggcuccgcgaacaagcccaaggacgagcuggacuacgccaacgacaucgagaagaagaucugcaagauggagaagugcagcgccgcguaugagccgagcgacaagcacaucaaggaguaccugaacaagauccagaacucccucugaggacuagucccuguucccagagcccacuuuuuuuucuuuuuuugaaauaaaauagccugucuuucagaucucaaaggcucuuuucagagccaccaaaaaaaaaaaaaaaaaaaaaaaaaaaaaaaaaaaaaaaaaaaaaaaaaaaaaaaaaaaaaaaaagaauu

SEQ ID NO: 9278 - RNA, 1367 nt, Artificial Sequence
  mRNA Design a-3 (hSL-A64-N5) comprising derived and/or modified sequence from Pf(3D7)__XP_001351122.1__HsALB_Pf-CSP(19-272)_L(AAY)_Pf-CSP(346-3 75)_L(AAY)_Pf-CSP(310-327)_L(AAY)_PADRE (opt1)
aggagagggcgcuuggcuugcaaggacccugagcugcggcauugaagcacacccaacccaacucgacugaagucagccucacugaaccggaucugagaaucuucucucucugggcuugccagggcucuccgaaccuagcuagcauccucuucaauuccaacuagaaagcuuaccaugaagugggugaccuucaucagccuccuguuccuguucuccagcgccuacucccuguuccaggaguaccagugcuacggcuccagcuccaacacccgggugcucaacgagcugaacuacgacaacgcggggaccaaccuguacaacgagcucgagaugaacuacuacggcaagcaggagaacugguacagccugaagaagaacucccgcagccugggggagaacgacgacggcaacaacgaggacaacgagaagcuccggaagcccaagcacaagaagcugaagcagccggccgacgggaaccccgaccccaacgccaaccccaacguggacccgaacgccaaccccaacgucgaccccaacgccaaccccaacguggacccgaacgcgaaccccaacgccaaccccaacgccaaccccaacgccaacccgaacgcgaaccccaacgccaaccccaacgccaaccccaacgccaacccgaacgccaaccccaacgcgaaccccaacgccaaccccaacgccaacccgaacgccaaccccaacgccaaccccaacgcgaaccccaacgccaacccgaacgccaaccccaacguggaccccaacgccaaccccaacgccaacccgaacgcgaaccccaacgccaaccccaacgccaacccgaacgccaaccccaacgccaaccccaacgcgaaccccaacgccaacccgaacgccaaccccaacgccaaccccaacgcgaaccccaacgccaacccgaacgccaaccccaacgccaaccccaacgccaaccccaacgcgaacccgaacgccaaccccgccgcguauaucaagcccggcuccgcgaacaagcccaaggacgagcuggacuacgccaacgacaucgagaagaagaucugcaagauggagaagugcagcgcggccuacgagccgagcgacaagcacaucaaggaguaccugaacaagauccagaacucccucgccgccuacgccaaguucguggccgccuggacccugaaggcggccgccugaggacuagucccuguucccagagcccacuuuuuuuucuuuuuuugaaauaaaauagccugucuuucagaucucaaaggcucuuuucagagccaccaaaaaaaaaaaaaaaaaaaaaaaaaaaaaaaaaaaaaaaaaaaaaaaaaaaaaaaaaaaaaaaaagaauu

SEQ ID NO: 9279 - RNA, 1367 nt, Artificial Sequence
  mRNA Design a-3 (hSL-A64-N5) comprising derived and/or modified sequence from Pf(3D7)__XP_001351122.1__HsALB_Pf-CSP(19-272)_L(AAY)_Pf-CSP(310-3 27)_L(AAY)_Pf-CSP(346-375)_L(AAY)_PADRE (opt1)
aggagagggcgcuuggcuugcaaggacccugagcugcggcauugaagcacacccaacccaacucgacugaagucagccucacugaaccggaucugagaaucuucucucucugggcuugccagggcucuccgaaccuagcuagcauccucuucaauuccaacuagaaagcuuaccaugaagugggugaccuucaucagccuccuguuccuguucuccagcgccuacucccuguuccaggaguaccagugcuacggcuccagcuccaacacccgggugcucaacgagcugaacuacgacaacgcggggaccaaccuguacaacgagcucgagaugaacuacuacggcaagcaggagaacugguacagccugaagaagaacucccgcagccugggggagaacgacgacggcaacaacgaggacaacgagaagcuccggaagcccaagcacaagaagcugaagcagccggccgacgggaaccccgaccccaacgccaaccccaacguggacccgaacgccaaccccaacgucgaccccaacgccaaccccaacguggacccgaacgcgaaccccaacgccaaccccaacgccaaccccaacgccaacccgaacgcgaaccccaacgccaaccccaacgccaaccccaacgccaacccgaacgccaaccccaacgcgaaccccaacgccaaccccaacgccaacccgaacgccaaccccaacgccaaccccaacgcgaaccccaacgccaacccgaacgccaaccccaacguggaccccaacgccaaccccaacgccaacccgaacgcgaaccccaacgccaaccccaacgccaacccgaacgccaaccccaacgccaaccccaacgcgaaccccaacgccaacccgaacgccaaccccaacgccaaccccaacgcgaaccccaacgccaacccgaacgccaaccccaacgccaaccccaacgccaaccccaacgcgaacccgaacgccaaccccgccgcguaugagccgagcgacaagcacaucaaggaguaccugaacaagauccagaacucccucgcggccuacaucaagcccggcuccgcgaacaagcccaaggacgagcuggacuacgccaacgacaucgagaagaagaucugcaagauggagaagugcagcgccgccuacgccaaguucguggccgccuggacccugaaggcggccgccugaggacuagucccuguucccagagcccacuuuuuuuucuuuuuuugaaauaaaauagccugucuuucagaucucaaaggcucuuuucagagccaccaaaaaaaaaaaaaaaaaaaaaaaaaaaaaaaaaaaaaaaaaaaaaaaaaaaaaaaaaaaaaaaaagaauu

SEQ ID NO: 9280 - RNA, 1421 nt, Artificial Sequence
  mRNA Design a-3 (hSL-A64-N5) comprising derived and/or modified sequence from Pf(3D7)__XP_001351122.1__HsALB_Pf-CSP(19-272)_L(AAY)_Pf-CSP(310-3 27)_L(AAY)_Pf-CSP(346-375)_L(AAY)_PADRE_L(AAY)_P2 (opt1)
aggagagggcgcuuggcuugcaaggacccugagcugcggcauugaagcacacccaacccaacucgacugaagucagccucacugaaccggaucugagaaucuucucucucugggcuugccagggcucuccgaaccuagcuagcauccucuucaauuccaacuagaaagcuuaccaugaagugggugaccuucaucagccuccuguuccuguucuccagcgccuacucccuguuccaggaguaccagugcuacggcuccagcuccaacacccgggugcucaacgagcugaacuacgacaacgcggggaccaaccuguacaacgagcucgagaugaacuacuacggcaagcaggagaacugguacagccugaagaagaacucccgcagccugggggagaacgacgacggcaacaacgaggacaacgagaagcuccggaagcccaagcacaagaagcugaagcagccggccgacgggaaccccgaccccaacgccaaccccaacguggacccgaacgccaaccccaacgucgaccccaacgccaaccccaacguggacccgaacgcgaaccccaacgccaaccccaacgccaaccccaacgccaacccgaacgcgaaccccaacgccaaccccaacgccaaccccaacgccaacccgaacgccaaccccaacgcgaaccccaacgccaaccccaacgccaacccgaacgccaaccccaacgccaaccccaacgcgaaccccaacgccaacccgaacgccaaccccaacguggaccccaacgccaaccccaacgccaacccgaacgcgaaccccaacgccaaccccaacgccaacccgaacgccaaccccaacgccaaccccaacgcgaaccccaacgccaacccgaacgccaaccccaacgccaaccccaacgcgaaccccaacgccaacccgaacgccaaccccaacgccaaccccaacgccaaccccaacgcgaacccgaacgccaaccccgcggccuacgagccgagcgacaagcacaucaaggaguaccugaacaagauccagaacucccucgccgcguauaucaagcccggcuccgcgaacaagcccaaggacgagcuggacuacgccaacgacaucgagaagaagaucugcaagauggagaagugcagcgccgccuacgccaaguucguggccgccuggacccugaaggcggccgccgccgcuuaccaguacaucaaggccaacagcaaguucaucggcaucaccgagcugugaggacuagucccuguucccagagcccacuuuuuuuucuuuuuuugaaauaaaauagccugucuuucagaucucaaaggcucuuuucagagccaccaaaaaaaaaaaaaaaaaaaaaaaaaaaaaaaaaaaaaaaaaaaaaaaaaaaaaaaaaaaaaaaaagaauu

SEQ ID NO: 9281 - RNA, 1385 nt, Artificial Sequence
  mRNA Design a-3 (hSL-A64-N5) comprising derived and/or modified sequence from Pf(3D7)__XP_001351122.1__HsALB_Pf-CSP(19-272)_L(AAY)_Pf-CSP(310-3 27)_Linker (AAY)_Pf-CSP(346-397) (opt1)
aggagagggcgcuuggcuugcaaggacccugagcugcggcauugaagcacacccaacccaacucgacugaagucagccucacugaaccggaucugagaaucuucucucucugggcuugccagggcucuccgaaccuagcuagcauccucuucaauuccaacuagaaagcuuaccaugaagugggugaccuucaucagccuccuguuccuguucuccagcgccuacucccuguuccaggaguaccagugcuacggcuccagcuccaacacccgggugcucaacgagcugaacuacgacaacgcggggaccaaccuguacaacgagcucgagaugaacuacuacggcaagcaggagaacugguacagccugaagaagaacucccgcagccugggggagaacgacgacggcaacaacgaggacaacgagaagcuccggaagcccaagcacaagaagcugaagcagccggccgacgggaaccccgaccccaacgccaaccccaacguggacccgaacgccaaccccaacgucgaccccaacgccaaccccaacguggacccgaacgcgaaccccaacgccaaccccaacgccaaccccaacgccaacccgaacgcgaaccccaacgccaaccccaacgccaaccccaacgccaacccgaacgccaaccccaacgcgaaccccaacgccaaccccaacgccaacccgaacgccaaccccaacgccaaccccaacgcgaaccccaacgccaacccgaacgccaaccccaacguggaccccaacgccaaccccaacgccaacccgaacgcgaaccccaacgccaaccccaacgccaacccgaacgccaaccccaacgccaaccccaacgcgaaccccaacgccaacccgaacgccaaccccaacgccaaccccaacgcgaaccccaacgccaacccgaacgccaaccccaacgccaaccccaacgccaaccccaacgcgaacccgaacgccaaccccgcggccuacgagccgagcgacaagcacaucaaggaguaccugaacaagauccagaacucccucgccgcguauaucaagcccggcuccgcgaacaagcccaaggacgagcuggacuacgccaacgacaucgagaagaagaucugcaagauggagaagugcagcuccguguucaacguggucaacagcuccaucgggcugaucauggugcucagcuuccuguuccugaacugaggacuagucccuguucccagagcccacuuuuuuuucuuuuuuugaaauaaaauagccugucuuucagaucucaaaggcucuuuucagagccaccaaaaaaaaaaaaaaaaaaaaaaaaaaaaaaaaaaaaaaaaaaaaaaaaaaaaaaaaaaaaaaaaagaauu

SEQ ID NO: 9282 - RNA, 1985 nt, Artificial Sequence
  mRNA Design a-3 (hSL-A64-N5) comprising derived and/or modified sequence from Pf(3D7)__XP_001351122.1__LumSynt_L(GGS4-GGG)_Pf-CSP(19-397) (opt1)
aggagagggcgcuuggcuugcaaggacccugagcugcggcauugaagcacacccaacccaacucgacugaagucagccucacugaaccggaucugagaaucuucucucucugggcuugccagggcucuccgaaccuagcuagcauccucuucaauuccaacuagaaagcuuaccaugcagaucuacgagggcaagcugaccgccgaggggcuccgcuucggcaucguggccagccgguucaaccacgcgcuggucgaccgccugguggagggggccaucgacgccaucgugcggcacggcgggcgcgaggaggacaucacccucguccgggugcccggcuccugggagaucccgguggccgccggcgagcuggcgcgcaaggaggacaucgacgccgucaucgccaucggggugcugauccggggcgccacgccccacuucgacuacaucgcgagcgagguguccaaggggcucgccgaccugagccuggagcuccgcaagcccaucaccuucggcgucaucaccgccgacacccuggagcaggccaucgagcgggccgggacgaagcacggcaacaagggcugggaggcggcccuguccgccaucgagauggccaaccucuucaagagccugcgcgggggcuccgggggcagcggcggguccggcgggagcggcgggggccuguuccaggaguaccagugcuacggcuccagcuccaacacccgggugcucaacgagcugaacuacgacaacgccgggaccaaccuguacaacgagcucgagaugaacuacuacggcaagcaggagaacugguacagccugaagaagaacucccgcagccugggggagaacgacgacggcaacaacgaggacaacgagaagcuccggaagcccaagcacaagaagcugaagcagccggcggacgggaaccccgaccccaacgccaaccccaacguggacccgaacgccaaccccaacgucgaccccaacgccaaccccaacguggacccgaacgccaaccccaacgcgaaccccaacgccaaccccaacgccaacccgaacgccaaccccaacgccaaccccaacgcgaaccccaacgccaacccgaacgccaaccccaacgccaaccccaacgcgaaccccaacgccaacccgaacgccaaccccaacgccaaccccaacgccaaccccaacgcgaacccgaacgccaaccccaacguggaccccaacgccaacccgaacgccaaccccaacgccaaccccaacgcgaaccccaacgccaacccgaacgccaaccccaacgccaaccccaacgccaaccccaacgcgaacccgaacgccaaccccaacgccaaccccaacgccaaccccaacgcgaacccgaacgccaaccccaacgccaaccccaacgccaaccccaacgccaacccgaacgcgaaccccaacaagaacaaccagggcaacggccaggggcacaacaugcccaacgaccccaaccgcaacgucgacgagaacgccaacgccaacuccgccgugaagaacaacaacaacgaggagccgagcgacaagcacaucaaggaguaccugaacaagauccagaacucccucagcaccgaguggagccccugcuccgugacgugcggcaacgggauccagguccggaucaagcccggcagcgccaacaagcccaaggacgagcuggacuacgcgaacgacaucgagaagaagaucugcaagauggagaagugcuccagcguguucaacguggucaacuccagcaucgggcugaucauggugcucuccuuccuguuccugaacugaggacuagucccuguucccagagcccacuuuuuuuucuuuuuuugaaauaaaauagccugucuuucagaucucaaaggcucuuuucagagccaccaaaaaaaaaaaaaaaaaaaaaaaaaaaaaaaaaaaaaaaaaaaaaaaaaaaaaaaaaaaaaaaaagaauu

SEQ ID NO: 9283 - RNA, 1847 nt, Artificial Sequence
  mRNA Design a-3 (hSL-A64-N5) comprising derived and/or modified sequence from Pf(3D7)__XP_001351122.1__HsALB_Pf-CSP(19-272)_L(PVTN)_HBsAg (opt1)
aggagagggcgcuuggcuugcaaggacccugagcugcggcauugaagcacacccaacccaacucgacugaagucagccucacugaaccggaucugagaaucuucucucucugggcuugccagggcucuccgaaccuagcuagcauccucuucaauuccaacuagaaagcuuaccaugaagugggugaccuucaucagccuccuguuccuguucuccagcgccuacucccuguuccaggaguaccagugcuacggcagcuccagcaacacccgcguccucaacgagcugaacuacgacaacgccgggaccaaccuguacaacgagcucgagaugaacuacuacggcaagcaggagaacugguacucccugaagaagaacagccggucccugggggagaacgacgacggcaacaacgaggacaacgagaagcuccgcaagcccaagcacaagaagcugaagcagccggcggacgggaaccccgaccccaacgccaaccccaacguggacccgaacgccaaccccaacguggaccccaacgccaaccccaacgucgacccgaacgccaaccccaacgcgaaccccaacgccaaccccaacgccaacccgaacgccaaccccaacgcgaaccccaacgccaaccccaacgccaacccgaacgccaaccccaacgccaaccccaacgcgaaccccaacgccaacccgaacgccaaccccaacgccaaccccaacgccaaccccaacgcgaacccgaacgccaaccccaacguggaccccaacgccaaccccaacgccaacccgaacgccaaccccaacgcgaaccccaacgccaacccgaacgccaaccccaacgccaaccccaacgccaaccccaacgcgaacccgaacgccaaccccaacgccaaccccaacgccaaccccaacgcgaacccgaacgccaaccccaacgccaaccccaacgccaaccccaacgccaacccgaacgcgaacccgcccgugaccaacauggagaacaucaccagcggcuuccugggcccccuccugguccugcaggccggguucuuccuccugacccggauccugacgaucccccagucccucgacagcugguggaccucccugaacuuccugggcgggagccccgugugccucggccagaacucccagagccccaccuccaaccacagccccaccuccugcccgcccaucugccccggguaccgcuggaugugccugcggcgcuucaucaucuuccuguucauccuccugcugugccucaucuuccugcuggugcuccuggacuaccagggcaugcugcccgucugcccgcucauccccggcagcacgaccaccaacaccgggcccugcaagacgugcaccaccccggcccagggcaacagcauguuccccuccugcugcugcaccaagcccacggacgggaacugcacgugcauccccaucccgagcuccugggccuucgccaaguaccugugggagugggcgagcgugcgguucuccuggcugagccuccuggugcccuucguccagugguucgugggccugucccccaccguguggcucagcgccaucuggaugaugugguacuggggccccucccuguacagcaucgucuccccguucaucccccugcuccccaucuucuucugccuguggguguacaucugaggacuagucccuguucccagagcccacuuuuuuuucuuuuuuugaaauaaaauagccugucuuucagaucucaaaggcucuuuucagagccaccaaaaaaaaaaaaaaaaaaaaaaaaaaaaaaaaaaaaaaaaaaaaaaaaaaaaaaaaaaaaaaaaagaauu

SEQ ID NO: 9284 - RNA, 1964 nt, Artificial Sequence
  mRNA Design a-3 (hSL-A64-N5) comprising derived and/or modified sequence from Pf(3D7)__XP_001351122.1__HsALB_Pf-CSP(19-272)_L(AAY)_Pf-CSP(346-3 65)_L(AAY)_PADRE_L(PVTN)_HBsAg (opt1)
aggagagggcgcuuggcuugcaaggacccugagcugcggcauugaagcacacccaacccaacucgacugaagucagccucacugaaccggaucugagaaucuucucucucugggcuugccagggcucuccgaaccuagcuagcauccucuucaauuccaacuagaaagcuuaccaugaagugggugaccuucaucagccugcuguuccuguucuccagcgccuacucccuguuccaggaguaccagugcuacggcagcuccagcaacacccgcguccucaacgagcugaacuacgacaacgccgggaccaaccuguacaacgagcucgagaugaacuacuacggcaagcaggagaacugguacucccugaagaagaacagccggucccugggggagaacgacgacggcaacaacgaggacaacgagaagcuccgcaagcccaagcacaagaagcugaagcagccggcggacgggaaccccgaccccaacgccaaccccaacguggacccgaacgccaaccccaacguggaccccaacgccaaccccaacgucgacccgaacgccaaccccaacgcgaaccccaacgccaaccccaacgccaacccgaacgccaaccccaacgcgaaccccaacgccaaccccaacgccaacccgaacgccaaccccaacgccaaccccaacgcgaaccccaacgccaacccgaacgccaaccccaacgccaaccccaacgccaaccccaacgcgaacccgaacgccaaccccaacguggaccccaacgccaaccccaacgccaacccgaacgccaaccccaacgcgaaccccaacgccaacccgaacgccaaccccaacgccaaccccaacgccaaccccaacgcgaacccgaacgccaaccccaacgccaaccccaacgccaaccccaacgcgaacccgaacgccaaccccaacgccaaccccaacgccaaccccaacgccaacccgaacgcgaaccccgccgccuacaucaagcccggcagcgccaacaagcccaaggacgagcuggacuacgccaacgacaucgaggcggccuacgccaaguucguggccgccuggacccucaaggcggccgccccggucaccaacauggagaacaucaccuccggcuuccuggggccccugcucgugcugcaggccggcuucuuccugcucacgcggauccugaccaucccccagagccuggacuccugguggaccagccucaacuuccucgggggcucccccgugugccuggggcagaacagccaguccccgaccagcaaccacucccccacgagcugcccgcccaucugccccggcuaccgcuggaugugccuccggcgcuucaucaucuuccuguucauccugcuccugugccugaucuuccuccugguccugcucgacuaccagggcaugcugcccgugugcccccugaucccggggagcaccaccaccaacacgggccccugcaagaccugcaccacccccgcgcaggggaacuccauguuccccagcugcugcugcacgaagccgaccgacggcaacugcacgugcauccccauccccuccagcugggccuucgccaaguaccucugggagugggccuccgugcgguucagcuggcugucccugcucguccccuucgugcagugguucgugggccugagcccgaccgucuggcuguccgccaucuggaugaugugguacugggggcccagccucuacuccaucgugagccccuucaucccccugcugccgaucuucuucugccucuggguguacaucugaggacuagucccuguucccagagcccacuuuuuuuucuuuuuuugaaauaaaauagccugucuuucagaucucaaaggcucuuuucagagccaccaaaaaaaaaaaaaaaaaaaaaaaaaaaaaaaaaaaaaaaaaaaaaaaaaaaaaaaaaaaaaaaaagaauu

SEQ ID NO: 9285 - RNA, 2183 nt, Artificial Sequence
  mRNA Design a-3 (hSL-A64-N5) comprising derived and/or modified sequence from Pf(3D7)__XP_001351122.1__HsALB_Pf-CSP(19-384)_L(PVTN)_HBsAg (opt1)
aggagagggcgcuuggcuugcaaggacccugagcugcggcauugaagcacacccaacccaacucgacugaagucagccucacugaaccggaucugagaaucuucucucucugggcuugccagggcucuccgaaccuagcuagcauccucuucaauuccaacuagaaagcuuaccaugaagugggugaccuucaucagccugcuguuccuguucuccagcgccuacucccuguuccaggaguaccagugcuacggcagcuccagcaacacccgcguccucaacgagcugaacuacgacaacgccgggacgaaccuguacaacgagcucgagaugaacuacuacggcaagcaggagaacugguacucccugaagaagaacagccggucccugggggagaacgacgacggcaacaacgaggacaacgagaagcuccgcaagcccaagcacaagaagcugaagcagccggcggacgggaaccccgaccccaacgccaaccccaacguggacccgaacgccaaccccaacguggaccccaacgccaaccccaacgucgacccgaacgccaaccccaacgcgaaccccaacgccaaccccaacgccaacccgaacgccaaccccaacgcgaaccccaacgccaaccccaacgccaacccgaacgccaaccccaacgccaaccccaacgcgaaccccaacgccaacccgaacgccaaccccaacgccaaccccaacgccaaccccaacgcgaacccgaacgccaaccccaacguggaccccaacgccaaccccaacgccaacccgaacgccaaccccaacgcgaaccccaacgccaacccgaacgccaaccccaacgccaaccccaacgccaaccccaacgcgaacccgaacgccaaccccaacgccaaccccaacgccaaccccaacgcgaacccgaacgccaaccccaacgccaaccccaacgccaaccccaacgccaacccgaacgcgaaccccaacaagaacaaccagggcaacggccaggggcacaacaugcccaacgaccccaaccggaacguggacgagaacgccaacgccaacagcgccgucaagaacaacaacaacgaggagccguccgacaagcacaucaaggaguaccugaacaagauccagaacagccucuccaccgaguggagccccugcuccgugaccugcggcaacgggauccaggugcgcaucaagcccggcagcgccaacaagcccaaggacgagcuggacuacgcgaacgacaucgagaagaagaucugcaagauggagaagugcuccagcgucuucaacguggugaacuccagcccggucaccaacauggagaacaucacgagcggguuccugggcccccuccuggugcugcaggccggcuucuuccuccugacccggauccugaccaucccccagucccucgacagcugguggaccucccugaacuuccucgggggcagccccgugugccucgggcagaacucccagagcccgacguccaaccacagccccaccuccugcccgcccaucugccccggcuaccgcuggaugugccugcggcgcuucaucaucuuccuguucauccuccugcugugccucaucuuccugcugguccuccuggacuaccagggcaugcugcccgugugcccccucaucccggggagcaccaccacgaacaccggccccugcaagaccugcaccacgcccgcccaggggaacuccauguuccccagcugcugcugcaccaagccgaccgacggcaacugcacgugcauccccauccccuccagcugggccuucgccaaguaccugugggagugggcguccgugcgguucagcuggcugucccuccugguccccuucgugcagugguucguggggcugagcccgaccgucuggcucuccgccaucuggaugaugugguacuggggccccagccuguacagcaucgugucccccuucaucccccugcucccgaucuucuucugccuguggguguacaucugaggacuagucccuguucccagagcccacuuuuuuuucuuuuuuugaaauaaaauagccugucuuucagaucucaaaggcucuuuucagagccaccaaaaaaaaaaaaaaaaaaaaaaaaaaaaaaaaaaaaaaaaaaaaaaaaaaaaaaaaaaaaaaaaagaauu

SEQ ID NO: 9286 - RNA, 2000 nt, Artificial Sequence
  mRNA Design a-3 (hSL-A64-N5) comprising derived and/or modified sequence from Pf(3D7)__XP_001351122.1__HsALB_Pf-CSP(19-384)_L(SGG)_Ferritin (opt1)
aggagagggcgcuuggcuugcaaggacccugagcugcggcauugaagcacacccaacccaacucgacugaagucagccucacugaaccggaucugagaaucuucucucucugggcuugccagggcucuccgaaccuagcuagcauccucuucaauuccaacuagaaagcuuaccaugaagugggugaccuucaucagccuccuguuccuguucuccagcgccuacucccuguuccaggaguaccagugcuacggcagcuccagcaacacccggguccucaacgagcugaacuacgacaacgccgggacgaaccuguacaacgagcucgagaugaacuacuacggcaagcaggagaacugguacucccugaagaagaacagccggucccugggggagaacgacgacggcaacaacgaggacaacgagaagcuccgcaagcccaagcacaagaagcugaagcagccggcggacgggaaccccgaccccaacgccaaccccaacguggacccgaacgccaaccccaacguggaccccaacgccaaccccaacgucgacccgaacgccaaccccaacgcgaaccccaacgccaaccccaacgccaacccgaacgccaaccccaacgcgaaccccaacgccaaccccaacgccaacccgaacgccaaccccaacgccaaccccaacgcgaaccccaacgccaacccgaacgccaaccccaacgccaaccccaacgccaaccccaacgcgaacccgaacgccaaccccaacguggaccccaacgccaaccccaacgccaacccgaacgccaaccccaacgcgaaccccaacgccaacccgaacgccaaccccaacgccaaccccaacgccaaccccaacgcgaacccgaacgccaaccccaacgccaaccccaacgccaaccccaacgcgaacccgaacgccaaccccaacgccaaccccaacgccaaccccaacgccaacccgaacgcgaaccccaacaagaacaaccagggcaacggccaggggcacaacaugcccaacgaccccaaccggaacguggacgagaacgccaacgccaacagcgccgucaagaacaacaacaacgaggagccguccgacaagcacaucaaggaguaccugaacaagauccagaacagccucuccaccgaguggagccccugcuccgugaccugcggcaacgggauccaggugcgcaucaagcccggcagcgccaacaagcccaaggacgagcuggacuacgcgaacgacaucgagaagaagaucugcaagauggagaagugcuccagcgucuucaacguggugaacuccagcagcgggggccuguccaaggacaucaucaagcuccugaacgagcaggucaacaaggagaugaacagcuccaaccuguacaugagcauguccagcuggugcuacacccacucccucgacggcgccgggcuguuccuguucgaccacgccgccgaggaguacgagcacgccaagaagcucaucaucuuccugaacgagaacaacgugccggugcagcugacgagcaucuccgcgcccgagcacaaguucgagggccucacccagaucuuccagaaggccuacgagcacgagcagcacaucagcgaguccaucaacaacaucgucgaccacgccaucaagagcaaggaccacgccaccuucaacuuccugcagugguacguggcggagcagcacgaggaggaggugcuguucaaggacauccucgacaagaucgagcugaucgggaacgagaaccacggccuguaccucgccgaccaguacgucaagggcaucgccaagucccgcaagagcugaggacuagucccuguucccagagcccacuuuuuuuucuuuuuuugaaauaaaauagccugucuuucagaucucaaaggcucuuuucagagccaccaaaaaaaaaaaaaaaaaaaaaaaaaaaaaaaaaaaaaaaaaaaaaaaaaaaaaaaaaaaaaaaaagaauu

SEQ ID NO: 9287 - RNA, 1961 nt, Artificial Sequence
  mRNA Design a-3 (hSL-A64-N5) comprising derived and/or modified sequence from Pf(3D7)__XP_001351122.1__HsALB_Pf-CSP(93-384)_L(PVTN)_HBsAg (opt1)
aggagagggcgcuuggcuugcaaggacccugagcugcggcauugaagcacacccaacccaacucgacugaagucagccucacugaaccggaucugagaaucuucucucucugggcuugccagggcucuccgaaccuagcuagcauccucuucaauuccaacuagaaagcuuaccaugaagugggugaccuucaucagccuccuguuccuguucuccagcgccuacuccaagcugaagcagcccgccgacggcaacccggaccccaacgcgaaccccaacgucgaccccaacgccaacccgaacguggaccccaacgccaaccccaacguggaccccaacgccaacccgaacgccaaccccaacgcgaaccccaacgccaaccccaacgccaacccgaacgccaaccccaacgcgaaccccaacgccaaccccaacgccaacccgaacgccaaccccaacgccaaccccaacgcgaaccccaacgccaacccgaacgccaaccccaacgccaaccccaacgccaaccccaacgcgaacccgaacgucgaccccaacgccaaccccaacgccaaccccaacgccaacccgaacgccaaccccaacgcgaaccccaacgccaacccgaacgccaaccccaacgccaaccccaacgccaaccccaacgcgaacccgaacgccaaccccaacgccaaccccaacgccaaccccaacgcgaacccgaacgccaaccccaacgccaaccccaacgccaaccccaacgccaacccgaacaagaacaaccaggggaacggccaggggcacaacaugcccaacgaccccaaccgcaacguggacgagaacgcgaacgccaacagcgccgugaagaacaacaacaacgaggagcccuccgacaagcacaucaaggaguaccucaacaagauccagaacagccuguccaccgaguggagcccgugcuccgugaccugcggcaacgggauccagguccggaucaagcccggcagcgccaacaagcccaaggacgagcuggacuacgccaacgacaucgagaagaagaucugcaagauggagaagugcuccagcguguucaacgucgugaacuccagccccgugaccaacauggagaacaucaccuccggcuuccucgggccgcugcugguccuccaggcgggcuucuuccugcugacccgcauccucacgaucccccagagccuggacuccugguggaccagccugaacuuccucgggggcucccccgugugccuggggcagaacagccagagccccaccuccaaccacagcccgaccuccugcccgcccaucugccccggcuaccgguggaugugccugcgccgguucaucaucuuccucuucauccugcugcucugccugaucuuccugcucgugcugcuggacuaccagggcaugcuccccgucugcccccugauccccgggagcacgaccaccaacaccggcccgugcaagacgugcaccacccccgcccaggggaacuccauguuccccagcugcugcugcaccaagcccacggacggcaacugcacgugcaucccgauccccuccagcugggccuucgccaaguaccugugggagugggccuccgugcgcuucagcuggcucucccugcuggugcccuucguccagugguucgugggccucagccccaccguguggcuguccgcgaucuggaugaugugguacugggggccgagccuguacuccaucgucagccccuucaucccccuccugcccaucuucuucugccuguggguguacaucugaggacuagucccuguucccagagcccacuuuuuuuucuuuuuuugaaauaaaauagccugucuuucagaucucaaaggcucuuuucagagccaccaaaaaaaaaaaaaaaaaaaaaaaaaaaaaaaaaaaaaaaaaaaaaaaaaaaaaaaaaaaaaaaaagaauu

SEQ ID NO: 9288 - RNA, 1622 nt, Artificial Sequence; identical to SEQ ID NO: 6860
  mRNA Design a-3 (hSL-A64-N5) comprising derived and/or modified sequence from Pf(3D7)__XP_001351122.1__HsALB_Pf-CSP(199-377)_L(PVTN)_HBsAg (opt1)

SEQ ID NO: 9289 - RNA, 1319 nt, Artificial Sequence
  mRNA Design a-3 (hSL-A64-N5) comprising derived and/or modified sequence from Pf(3D7)__XP_001351122.1__HsALB_Pf-CSP(19-272)_L(AAY)_Pf-CSP(346-3 75)_L(AAY)_Pf-CSP(310-327) (opt1)
aggagagggcgcuuggcuugcaaggacccugagcugcggcauugaagcacacccaacccaacucgacugaagucagccucacugaaccggaucugagaaucuucucucucugggcuugccagggcucuccgaaccuagcuagcauccucuucaauuccaacuagaaagcuuaccaugaagugggugaccuucaucagccuccuguuccuguucuccagcgccuacucccuguuccaggaguaccagugcuacggcagcuccagcaacacccgcguccucaacgagcugaacuacgacaacgccgggacgaaccuguacaacgagcucgagaugaacuacuacggcaagcaggagaacugguacucccugaagaagaacagccggucccugggggagaacgacgacggcaacaacgaggacaacgagaagcuccgcaagcccaagcacaagaagcugaagcagccggcggacgggaaccccgaccccaacgccaaccccaacguggacccgaacgccaaccccaacguggaccccaacgccaaccccaacgucgacccgaacgccaaccccaacgcgaaccccaacgccaaccccaacgccaacccgaacgccaaccccaacgcgaaccccaacgccaaccccaacgccaacccgaacgccaaccccaacgccaaccccaacgcgaaccccaacgccaacccgaacgccaaccccaacgccaaccccaacgccaaccccaacgcgaacccgaacgccaaccccaacguggaccccaacgccaaccccaacgccaacccgaacgccaaccccaacgcgaaccccaacgccaacccgaacgccaaccccaacgccaaccccaacgccaaccccaacgcgaacccgaacgccaaccccaacgccaaccccaacgccaaccccaacgcgaacccgaacgccaaccccaacgccaaccccaacgccaaccccaacgccaacccgaacgcgaaccccgccgccuacaucaagcccggcagcgccaacaagcccaaggacgagcuggacuacgccaacgacaucgagaagaagaucugcaagauggagaagugcuccgcggccuacgagccgagcgacaagcacaucaaggaguaccucaacaagauccagaacucccugugaggacuagucccuguucccagagcccacuuuuuuuucuuuuuuugaaauaaaauagccugucuuucagaucucaaaggcucuuuucagagccaccaaaaaaaaaaaaaaaaaaaaaaaaaaaaaaaaaaaaaaaaaaaaaaaaaaaaaaaaaaaaaaaaagaauu

SEQ ID NO: 9290 - RNA, 1367 nt, Artificial Sequence
  mRNA Design a-3 (hSL-A64-N5) comprising derived and/or modified sequence from Pf(3D7)__XP_001351122.1__HsALB_Pf-CSP(19-272)_L(AAY)_Pf-CSP(346-3 75)_L(AAY)_Pf-CSP(310-327)_L(AAY)_PADRE (opt1)
aggagagggcgcuuggcuugcaaggacccugagcugcggcauugaagcacacccaacccaacucgacugaagucagccucacugaaccggaucugagaaucuucucucucugggcuugccagggcucuccgaaccuagcuagcauccucuucaauuccaacuagaaagcuuaccaugaagugggugaccuucaucagccuccuguuccuguucuccagcgccuacucccuguuccaggaguaccagugcuacggcagcuccagcaacacccgcguccucaacgagcugaacuacgacaacgccgggacgaaccuguacaacgagcucgagaugaacuacuacggcaagcaggagaacugguacucccugaagaagaacagccggucccugggggagaacgacgacggcaacaacgaggacaacgagaagcuccgcaagcccaagcacaagaagcugaagcagccggcggacgggaaccccgaccccaacgccaaccccaacguggacccgaacgccaaccccaacguggaccccaacgccaaccccaacgucgacccgaacgccaaccccaacgcgaaccccaacgccaaccccaacgccaacccgaacgccaaccccaacgcgaaccccaacgccaaccccaacgccaacccgaacgccaaccccaacgccaaccccaacgcgaaccccaacgccaacccgaacgccaaccccaacgccaaccccaacgccaaccccaacgcgaacccgaacgccaaccccaacguggaccccaacgccaaccccaacgccaacccgaacgccaaccccaacgcgaaccccaacgccaacccgaacgccaaccccaacgccaaccccaacgccaaccccaacgcgaacccgaacgccaaccccaacgccaaccccaacgccaaccccaacgcgaacccgaacgccaaccccaacgccaaccccaacgccaaccccaacgccaacccgaacgcgaaccccgccgccuacaucaagcccggcagcgccaacaagcccaaggacgagcuggacuacgccaacgacaucgagaagaagaucugcaagauggagaagugcuccgcggccuacgagccgagcgacaagcacaucaaggaguaccucaacaagauccagaacucccuggccgccuacgccaaguucguggcggccuggacccugaaggccgccgcgugaggacuagucccuguucccagagcccacuuuuuuuucuuuuuuugaaauaaaauagccugucuuucagaucucaaaggcucuuuucagagccaccaaaaaaaaaaaaaaaaaaaaaaaaaaaaaaaaaaaaaaaaaaaaaaaaaaaaaaaaaaaaaaaaagaauu

SEQ ID NO: 9291 - RNA, 1367 nt, Artificial Sequence
  mRNA Design a-3 (hSL-A64-N5) comprising derived and/or modified sequence from Pf(3D7)__XP_001351122.1__HsALB_Pf-CSP(19-272)_L(AAY)_Pf-CSP(310-3 27)_L(AAY)_Pf-CSP(346-375)_L(AAY)_PADRE (opt1)
aggagagggcgcuuggcuugcaaggacccugagcugcggcauugaagcacacccaacccaacucgacugaagucagccucacugaaccggaucugagaaucuucucucucugggcuugccagggcucuccgaaccuagcuagcauccucuucaauuccaacuagaaagcuuaccaugaagugggugaccuucaucagccuccuguuccuguucuccagcgccuacucccuguuccaggaguaccagugcuacggcagcuccagcaacacccgcguccucaacgagcugaacuacgacaacgccgggacgaaccuguacaacgagcucgagaugaacuacuacggcaagcaggagaacugguacucccugaagaagaacagccggucccugggggagaacgacgacggcaacaacgaggacaacgagaagcuccgcaagcccaagcacaagaagcugaagcagccggcggacgggaaccccgaccccaacgccaaccccaacguggacccgaacgccaaccccaacguggaccccaacgccaaccccaacgucgacccgaacgccaaccccaacgcgaaccccaacgccaaccccaacgccaacccgaacgccaaccccaacgcgaaccccaacgccaaccccaacgccaacccgaacgccaaccccaacgccaaccccaacgcgaaccccaacgccaacccgaacgccaaccccaacgccaaccccaacgccaaccccaacgcgaacccgaacgccaaccccaacguggaccccaacgccaaccccaacgccaacccgaacgccaaccccaacgcgaaccccaacgccaacccgaacgccaaccccaacgccaaccccaacgccaaccccaacgcgaacccgaacgccaaccccaacgccaaccccaacgccaaccccaacgcgaacccgaacgccaaccccaacgccaaccccaacgccaaccccaacgccaacccgaacgcgaaccccgccgccuacgagcccagcgacaagcacaucaaggaguaccugaacaagauccagaacucccucgccgccuacaucaagcccggcagcgcgaacaagccgaaggacgagcuggacuacgccaacgacaucgagaagaagaucugcaagauggagaagugcuccgccgccuacgccaaguucguggcggccuggacccugaaggccgccgcgugaggacuagucccuguucccagagcccacuuuuuuuucuuuuuuugaaauaaaauagccugucuuucagaucucaaaggcucuuuucagagccaccaaaaaaaaaaaaaaaaaaaaaaaaaaaaaaaaaaaaaaaaaaaaaaaaaaaaaaaaaaaaaaaaagaauu

SEQ ID NO: 9292 - RNA, 1421 nt, Artificial Sequence
  mRNA Design a-3 (hSL-A64-N5) comprising derived and/or modified sequence from Pf(3D7)__XP_001351122.1__HsALB_Pf-CSP(19-272)_L(AAY)_Pf-CSP(310-3 27)_L(AAY)_Pf-CSP(346-375)_L(AAY)_PADRE_L(AAY)_P2 (opt1)
aggagagggcgcuuggcuugcaaggacccugagcugcggcauugaagcacacccaacccaacucgacugaagucagccucacugaaccggaucugagaaucuucucucucugggcuugccagggcucuccgaaccuagcuagcauccucuucaauuccaacuagaaagcuuaccaugaagugggugaccuucaucagccuccuguuccuguucuccagcgccuacucccuguuccaggaguaccagugcuacggcagcuccagcaacacccgcguccucaacgagcugaacuacgacaacgccgggacgaaccuguacaacgagcucgagaugaacuacuacggcaagcaggagaacugguacucccugaagaagaacagccggucccugggggagaacgacgacggcaacaacgaggacaacgagaagcuccgcaagcccaagcacaagaagcugaagcagccggcggacgggaaccccgaccccaacgccaaccccaacguggacccgaacgccaaccccaacguggaccccaacgccaaccccaacgucgacccgaacgccaaccccaacgcgaaccccaacgccaaccccaacgccaacccgaacgccaaccccaacgcgaaccccaacgccaaccccaacgccaacccgaacgccaaccccaacgccaaccccaacgcgaaccccaacgccaacccgaacgccaaccccaacgccaaccccaacgccaaccccaacgcgaacccgaacgccaaccccaacguggaccccaacgccaaccccaacgccaacccgaacgccaaccccaacgcgaaccccaacgccaacccgaacgccaaccccaacgccaaccccaacgccaaccccaacgcgaacccgaacgccaaccccaacgccaaccccaacgccaaccccaacgcgaacccgaacgccaaccccaacgccaaccccaacgccaaccccaacgccaacccgaacgcgaaccccgccgccuacgagcccagcgacaagcacaucaaggaguaccugaacaagauccagaacucccucgccgccuacaucaagcccggcagcgcgaacaagccgaaggacgagcuggacuacgccaacgacaucgagaagaagaucugcaagauggagaagugcuccgccgccuacgccaaguucguggcggccuggacccugaaggccgccgcggccgccuaccaguacaucaaggccaacagcaaguucaucggcaucaccgagcucugaggacuagucccuguucccagagcccacuuuuuuuucuuuuuuugaaauaaaauagccugucuuucagaucucaaaggcucuuuucagagccaccaaaaaaaaaaaaaaaaaaaaaaaaaaaaaaaaaaaaaaaaaaaaaaaaaaaaaaaaaaaaaaaaagaauu

SEQ ID NO: 9293 - RNA, 1385 nt, Artificial Sequence
  mRNA Design a-3 (hSL-A64-N5) comprising derived and/or modified sequence from Pf(3D7)__XP_001351122.1__HsALB_Pf-CSP(19-272)_L(AAY)_Pf-CSP(310-3 27)_Linker (AAY)_Pf-CSP(346-397) (opt1)
aggagagggcgcuuggcuugcaaggacccugagcugcggcauugaagcacacccaacccaacucgacugaagucagccucacugaaccggaucugagaaucuucucucucugggcuugccagggcucuccgaaccuagcuagcauccucuucaauuccaacuagaaagcuuaccaugaagugggugaccuucaucagccuccuguuccuguucuccagcgccuacucccuguuccaggaguaccagugcuacggcagcuccagcaacacccgcguccucaacgagcugaacuacgacaacgccgggacgaaccuguacaacgagcucgagaugaacuacuacggcaagcaggagaacugguacucccugaagaagaacagccggucccugggggagaacgacgacggcaacaacgaggacaacgagaagcuccgcaagcccaagcacaagaagcugaagcagccggcggacgggaaccccgaccccaacgccaaccccaacguggacccgaacgccaaccccaacguggaccccaacgccaaccccaacgucgacccgaacgccaaccccaacgcgaaccccaacgccaaccccaacgccaacccgaacgccaaccccaacgcgaaccccaacgccaaccccaacgccaacccgaacgccaaccccaacgccaaccccaacgcgaaccccaacgccaacccgaacgccaaccccaacgccaaccccaacgccaaccccaacgcgaacccgaacgccaaccccaacguggaccccaacgccaaccccaacgccaacccgaacgccaaccccaacgcgaaccccaacgccaacccgaacgccaaccccaacgccaaccccaacgccaaccccaacgcgaacccgaacgccaaccccaacgccaaccccaacgccaaccccaacgcgaacccgaacgccaaccccaacgccaaccccaacgccaaccccaacgccaacccgaacgcgaaccccgccgccuacgagcccagcgacaagcacaucaaggaguaccugaacaagauccagaacucccucgccgccuacaucaagcccggcagcgcgaacaagccgaaggacgagcuggacuacgccaacgacaucgagaagaagaucugcaagauggagaagugcuccagcguguucaacgucgugaacuccagcaucggccugaucauggugcucuccuuccuguuccugaacugaggacuagucccuguucccagagcccacuuuuuuuucuuuuuuugaaauaaaauagccugucuuucagaucucaaaggcucuuuucagagccaccaaaaaaaaaaaaaaaaaaaaaaaaaaaaaaaaaaaaaaaaaaaaaaaaaaaaaaaaaaaaaaaaagaauu

SEQ ID NO: 9294 - RNA, 1985 nt, Artificial Sequence
  mRNA Design a-3 (hSL-A64-N5) comprising derived and/or modified sequence from Pf(3D7)__XP_001351122.1__LumSynt_L(GGS4-GGG)_Pf-CSP(19-397) (opt2)
aggagagggcgcuuggcuugcaaggacccugagcugcggcauugaagcacacccaacccaacucgacugaagucagccucacugaaccggaucugagaaucuucucucucugggcuugccagggcucuccgaaccuagcuagcauccucuucaauuccaacuagaaagcuuaccaugcagaucuacgagggcaagcucaccgccgagggccuccgcuucggcaucgucgccucccgcuucaaccacgcccucgucgaccgccucgucgagggcgccaucgacgccaucguccgccacggcggccgcgaggaggacaucacccucguccgcguccccggcuccugggagauccccgucgccgccggcgagcucgcccgcaaggaggacaucgacgccgucaucgccaucggcguccucauccgcggcgccaccccccacuucgacuacaucgccuccgaggucuccaagggccucgccgaccucucccucgagcuccgcaagcccaucaccuucggcgucaucaccgccgacacccucgagcaggccaucgagcgcgccggcaccaagcacggcaacaagggcugggaggccgcccucuccgccaucgagauggccaaccucuucaagucccuccgcggcggcuccggcggcuccggcggcuccggcggcuccggcggcggccucuuccaggaguaccagugcuacggcuccuccuccaacacccgcguccucaacgagcucaacuacgacaacgccggcaccaaccucuacaacgagcucgagaugaacuacuacggcaagcaggagaacugguacucccucaagaagaacucccgcucccucggcgagaacgacgacggcaacaacgaggacaacgagaagcuccgcaagcccaagcacaagaagcucaagcagcccgccgacggcaaccccgaccccaacgccaaccccaacgucgaccccaacgccaaccccaacgucgaccccaacgccaaccccaacgucgaccccaacgccaaccccaacgccaaccccaacgccaaccccaacgccaaccccaacgccaaccccaacgccaaccccaacgccaaccccaacgccaaccccaacgccaaccccaacgccaaccccaacgccaaccccaacgccaaccccaacgccaaccccaacgccaaccccaacgccaaccccaacgccaaccccaacgccaaccccaacgucgaccccaacgccaaccccaacgccaaccccaacgccaaccccaacgccaaccccaacgccaaccccaacgccaaccccaacgccaaccccaacgccaaccccaacgccaaccccaacgccaaccccaacgccaaccccaacgccaaccccaacgccaaccccaacgccaaccccaacgccaaccccaacgccaaccccaacgccaaccccaacgccaaccccaacaagaacaaccagggcaacggccagggccacaacaugcccaacgaccccaaccgcaacgucgacgagaacgccaacgccaacuccgccgucaagaacaacaacaacgaggagcccuccgacaagcacaucaaggaguaccucaacaagauccagaacucccucuccaccgaguggucccccugcuccgucaccugcggcaacggcauccagguccgcaucaagcccggcuccgccaacaagcccaaggacgagcucgacuacgccaacgacaucgagaagaagaucugcaagauggagaagugcuccuccgucuucaacgucgucaacuccuccaucggccucaucaugguccucuccuuccucuuccucaacugaggacuagucccuguucccagagcccacuuuuuuuucuuuuuuugaaauaaaauagccugucuuucagaucucaaaggcucuuuucagagccaccaaaaaaaaaaaaaaaaaaaaaaaaaaaaaaaaaaaaaaaaaaaaaaaaaaaaaaaaaaaaaaaaagaauu

SEQ ID NO: 9295 - RNA, 1847 nt, Artificial Sequence
  mRNA Design a-3 (hSL-A64-N5) comprising derived and/or modified sequence from Pf(3D7)__XP_001351122.1__HsALB_Pf-CSP(19-272)_L(PVTN)_HBsAg (opt2)
aggagagggcgcuuggcuugcaaggacccugagcugcggcauugaagcacacccaacccaacucgacugaagucagccucacugaaccggaucugagaaucuucucucucugggcuugccagggcucuccgaaccuagcuagcauccucuucaauuccaacuagaaagcuuaccaugaagugggucaccuucaucucccuccucuuccucuucuccuccgccuacucccucuuccaggaguaccagugcuacggcuccuccuccaacacccgcguccucaacgagcucaacuacgacaacgccggcaccaaccucuacaacgagcucgagaugaacuacuacggcaagcaggagaacugguacucccucaagaagaacucccgcucccucggcgagaacgacgacggcaacaacgaggacaacgagaagcuccgcaagcccaagcacaagaagcucaagcagcccgccgacggcaaccccgaccccaacgccaaccccaacgucgaccccaacgccaaccccaacgucgaccccaacgccaaccccaacgucgaccccaacgccaaccccaacgccaaccccaacgccaaccccaacgccaaccccaacgccaaccccaacgccaaccccaacgccaaccccaacgccaaccccaacgccaaccccaacgccaaccccaacgccaaccccaacgccaaccccaacgccaaccccaacgccaaccccaacgccaaccccaacgccaaccccaacgccaaccccaacgucgaccccaacgccaaccccaacgccaaccccaacgccaaccccaacgccaaccccaacgccaaccccaacgccaaccccaacgccaaccccaacgccaaccccaacgccaaccccaacgccaaccccaacgccaaccccaacgccaaccccaacgccaaccccaacgccaaccccaacgccaaccccaacgccaaccccaacgccaaccccaacgccaacccccccgucaccaacauggagaacaucaccuccggcuuccucggcccccuccucguccuccaggccggcuucuuccuccucacccgcauccucaccaucccccagucccucgacuccugguggaccucccucaacuuccucggcggcucccccgucugccucggccagaacucccagucccccaccuccaaccacucccccaccuccugcccccccaucugccccggcuaccgcuggaugugccuccgccgcuucaucaucuuccucuucauccuccuccucugccucaucuuccuccucguccuccucgacuaccagggcaugcuccccgucugcccccucauccccggcuccaccaccaccaacaccggccccugcaagaccugcaccacccccgcccagggcaacuccauguuccccuccugcugcugcaccaagcccaccgacggcaacugcaccugcauccccauccccuccuccugggccuucgccaaguaccucugggagugggccuccguccgcuucuccuggcucucccuccucguccccuucguccagugguucgucggccucucccccaccgucuggcucuccgccaucuggaugaugugguacuggggccccucccucuacuccaucgucucccccuucaucccccuccuccccaucuucuucugccucugggucuacaucugaggacuagucccuguucccagagcccacuuuuuuuucuuuuuuugaaauaaaauagccugucuuucagaucucaaaggcucuuuucagagccaccaaaaaaaaaaaaaaaaaaaaaaaaaaaaaaaaaaaaaaaaaaaaaaaaaaaaaaaaaaaaaaaaagaauu

SEQ ID NO: 9296 - RNA, 1964 nt, Artificial Sequence
  mRNA Design a-3 (hSL-A64-N5) comprising derived and/or modified sequence from Pf(3D7)__XP_001351122.1__HsALB_Pf-CSP(19-272)_L(AAY)_Pf-CSP(346-3 65)_L(AAY)_PADRE_L(PVTN)_HBsAg (opt2)
aggagagggcgcuuggcuugcaaggacccugagcugcggcauugaagcacacccaacccaacucgacugaagucagccucacugaaccggaucugagaaucuucucucucugggcuugccagggcucuccgaaccuagcuagcauccucuucaauuccaacuagaaagcuuaccaugaagugggucaccuucaucucccuccucuuccucuucuccuccgccuacucccucuuccaggaguaccagugcuacggcuccuccuccaacacccgcguccucaacgagcucaacuacgacaacgccggcaccaaccucuacaacgagcucgagaugaacuacuacggcaagcaggagaacugguacucccucaagaagaacucccgcucccucggcgagaacgacgacggcaacaacgaggacaacgagaagcuccgcaagcccaagcacaagaagcucaagcagcccgccgacggcaaccccgaccccaacgccaaccccaacgucgaccccaacgccaaccccaacgucgaccccaacgccaaccccaacgucgaccccaacgccaaccccaacgccaaccccaacgccaaccccaacgccaaccccaacgccaaccccaacgccaaccccaacgccaaccccaacgccaaccccaacgccaaccccaacgccaaccccaacgccaaccccaacgccaaccccaacgccaaccccaacgccaaccccaacgccaaccccaacgccaaccccaacgccaaccccaacgucgaccccaacgccaaccccaacgccaaccccaacgccaaccccaacgccaaccccaacgccaaccccaacgccaaccccaacgccaaccccaacgccaaccccaacgccaaccccaacgccaaccccaacgccaaccccaacgccaaccccaacgccaaccccaacgccaaccccaacgccaaccccaacgccaaccccaacgccaaccccaacgccaaccccgccgccuacaucaagcccggcuccgccaacaagcccaaggacgagcucgacuacgccaacgacaucgaggccgccuacgccaaguucgucgccgccuggacccucaaggccgccgcccccgucaccaacauggagaacaucaccuccggcuuccucggcccccuccucguccuccaggccggcuucuuccuccucacccgcauccucaccaucccccagucccucgacuccugguggaccucccucaacuuccucggcggcucccccgucugccucggccagaacucccagucccccaccuccaaccacucccccaccuccugcccccccaucugccccggcuaccgcuggaugugccuccgccgcuucaucaucuuccucuucauccuccuccucugccucaucuuccuccucguccuccucgacuaccagggcaugcuccccgucugcccccucauccccggcuccaccaccaccaacaccggccccugcaagaccugcaccacccccgcccagggcaacuccauguuccccuccugcugcugcaccaagcccaccgacggcaacugcaccugcauccccauccccuccuccugggccuucgccaaguaccucugggagugggccuccguccgcuucuccuggcucucccuccucguccccuucguccagugguucgucggccucucccccaccgucuggcucuccgccaucuggaugaugugguacuggggccccucccucuacuccaucgucucccccuucaucccccuccuccccaucuucuucugccucugggucuacaucugaggacuagucccuguucccagagcccacuuuuuuuucuuuuuuugaaauaaaauagccugucuuucagaucucaaaggcucuuuucagagccaccaaaaaaaaaaaaaaaaaaaaaaaaaaaaaaaaaaaaaaaaaaaaaaaaaaaaaaaaaaaaaaaaagaauu

SEQ ID NO: 9297 - RNA, 2183 nt, Artificial Sequence
  mRNA Design a-3 (hSL-A64-N5) comprising derived and/or modified sequence from Pf(3D7)__XP_001351122.1__HsALB_Pf-CSP(19-384)_L(PVTN)_HBsAg (opt2)
aggagagggcgcuuggcuugcaaggacccugagcugcggcauugaagcacacccaacccaacucgacugaagucagccucacugaaccggaucugagaaucuucucucucugggcuugccagggcucuccgaaccuagcuagcauccucuucaauuccaacuagaaagcuuaccaugaagugggucaccuucaucucccuccucuuccucuucuccuccgccuacucccucuuccaggaguaccagugcuacggcuccuccuccaacacccgcguccucaacgagcucaacuacgacaacgccggcaccaaccucuacaacgagcucgagaugaacuacuacggcaagcaggagaacugguacucccucaagaagaacucccgcucccucggcgagaacgacgacggcaacaacgaggacaacgagaagcuccgcaagcccaagcacaagaagcucaagcagcccgccgacggcaaccccgaccccaacgccaaccccaacgucgaccccaacgccaaccccaacgucgaccccaacgccaaccccaacgucgaccccaacgccaaccccaacgccaaccccaacgccaaccccaacgccaaccccaacgccaaccccaacgccaaccccaacgccaaccccaacgccaaccccaacgccaaccccaacgccaaccccaacgccaaccccaacgccaaccccaacgccaaccccaacgccaaccccaacgccaaccccaacgccaaccccaacgccaaccccaacgucgaccccaacgccaaccccaacgccaaccccaacgccaaccccaacgccaaccccaacgccaaccccaacgccaaccccaacgccaaccccaacgccaaccccaacgccaaccccaacgccaaccccaacgccaaccccaacgccaaccccaacgccaaccccaacgccaaccccaacgccaaccccaacgccaaccccaacgccaaccccaacgccaaccccaacaagaacaaccagggcaacggccagggccacaacaugcccaacgaccccaaccgcaacgucgacgagaacgccaacgccaacuccgccgucaagaacaacaacaacgaggagcccuccgacaagcacaucaaggaguaccucaacaagauccagaacucccucuccaccgaguggucccccugcuccgucaccugcggcaacggcauccagguccgcaucaagcccggcuccgccaacaagcccaaggacgagcucgacuacgccaacgacaucgagaagaagaucugcaagauggagaagugcuccuccgucuucaacgucgucaacuccucccccgucaccaacauggagaacaucaccuccggcuuccucggcccccuccucguccuccaggccggcuucuuccuccucacccgcauccucaccaucccccagucccucgacuccugguggaccucccucaacuuccucggcggcucccccgucugccucggccagaacucccagucccccaccuccaaccacucccccaccuccugcccccccaucugccccggcuaccgcuggaugugccuccgccgcuucaucaucuuccucuucauccuccuccucugccucaucuuccuccucguccuccucgacuaccagggcaugcuccccgucugcccccucauccccggcuccaccaccaccaacaccggccccugcaagaccugcaccacccccgcccagggcaacuccauguuccccuccugcugcugcaccaagcccaccgacggcaacugcaccugcauccccauccccuccuccugggccuucgccaaguaccucugggagugggccuccguccgcuucuccuggcucucccuccucguccccuucguccagugguucgucggccucucccccaccgucuggcucuccgccaucuggaugaugugguacuggggccccucccucuacuccaucgucucccccuucaucccccuccuccccaucuucuucugccucugggucuacaucugaggacuagucccuguucccagagcccacuuuuuuuucuuuuuuugaaauaaaauagccugucuuucagaucucaaaggcucuuuucagagccaccaaaaaaaaaaaaaaaaaaaaaaaaaaaaaaaaaaaaaaaaaaaaaaaaaaaaaaaaaaaaaaaaagaauu

SEQ ID NO: 9298 - RNA, 2000 nt, Artificial Sequence
  mRNA Design a-3 (hSL-A64-N5) comprising derived and/or modified sequence from Pf(3D7)__XP_001351122.1__HsALB_Pf-CSP(19-384)_L(SGG)_Ferritin (opt2)
aggagagggcgcuuggcuugcaaggacccugagcugcggcauugaagcacacccaacccaacucgacugaagucagccucacugaaccggaucugagaaucuucucucucugggcuugccagggcucuccgaaccuagcuagcauccucuucaauuccaacuagaaagcuuaccaugaagugggucaccuucaucucccuccucuuccucuucuccuccgccuacucccucuuccaggaguaccagugcuacggcuccuccuccaacacccgcguccucaacgagcucaacuacgacaacgccggcaccaaccucuacaacgagcucgagaugaacuacuacggcaagcaggagaacugguacucccucaagaagaacucccgcucccucggcgagaacgacgacggcaacaacgaggacaacgagaagcuccgcaagcccaagcacaagaagcucaagcagcccgccgacggcaaccccgaccccaacgccaaccccaacgucgaccccaacgccaaccccaacgucgaccccaacgccaaccccaacgucgaccccaacgccaaccccaacgccaaccccaacgccaaccccaacgccaaccccaacgccaaccccaacgccaaccccaacgccaaccccaacgccaaccccaacgccaaccccaacgccaaccccaacgccaaccccaacgccaaccccaacgccaaccccaacgccaaccccaacgccaaccccaacgccaaccccaacgccaaccccaacgucgaccccaacgccaaccccaacgccaaccccaacgccaaccccaacgccaaccccaacgccaaccccaacgccaaccccaacgccaaccccaacgccaaccccaacgccaaccccaacgccaaccccaacgccaaccccaacgccaaccccaacgccaaccccaacgccaaccccaacgccaaccccaacgccaaccccaacgccaaccccaacgccaaccccaacaagaacaaccagggcaacggccagggccacaacaugcccaacgaccccaaccgcaacgucgacgagaacgccaacgccaacuccgccgucaagaacaacaacaacgaggagcccuccgacaagcacaucaaggaguaccucaacaagauccagaacucccucuccaccgaguggucccccugcuccgucaccugcggcaacggcauccagguccgcaucaagcccggcuccgccaacaagcccaaggacgagcucgacuacgccaacgacaucgagaagaagaucugcaagauggagaagugcuccuccgucuucaacgucgucaacuccuccuccggcggccucuccaaggacaucaucaagcuccucaacgagcaggucaacaaggagaugaacuccuccaaccucuacauguccauguccuccuggugcuacacccacucccucgacggcgccggccucuuccucuucgaccacgccgccgaggaguacgagcacgccaagaagcucaucaucuuccucaacgagaacaacguccccguccagcucaccuccaucuccgcccccgagcacaaguucgagggccucacccagaucuuccagaaggccuacgagcacgagcagcacaucuccgaguccaucaacaacaucgucgaccacgccaucaaguccaaggaccacgccaccuucaacuuccuccagugguacgucgccgagcagcacgaggaggagguccucuucaaggacauccucgacaagaucgagcucaucggcaacgagaaccacggccucuaccucgccgaccaguacgucaagggcaucgccaagucccgcaaguccugaggacuagucccuguucccagagcccacuuuuuuuucuuuuuuugaaauaaaauagccugucuuucagaucucaaaggcucuuuucagagccaccaaaaaaaaaaaaaaaaaaaaaaaaaaaaaaaaaaaaaaaaaaaaaaaaaaaaaaaaaaaaaaaaagaauu

SEQ ID NO: 9299 - RNA, 1961 nt, Artificial Sequence
  mRNA Design a-3 (hSL-A64-N5) comprising derived and/or modified sequence from Pf(3D7)__XP_001351122.1__HsALB_Pf-CSP(93-384)_L(PVTN)_HBsAg (opt2)
aggagagggcgcuuggcuugcaaggacccugagcugcggcauugaagcacacccaacccaacucgacugaagucagccucacugaaccggaucugagaaucuucucucucugggcuugccagggcucuccgaaccuagcuagcauccucuucaauuccaacuagaaagcuuaccaugaagugggucaccuucaucucccuccucuuccucuucuccuccgccuacuccaagcucaagcagcccgccgacggcaaccccgaccccaacgccaaccccaacgucgaccccaacgccaaccccaacgucgaccccaacgccaaccccaacgucgaccccaacgccaaccccaacgccaaccccaacgccaaccccaacgccaaccccaacgccaaccccaacgccaaccccaacgccaaccccaacgccaaccccaacgccaaccccaacgccaaccccaacgccaaccccaacgccaaccccaacgccaaccccaacgccaaccccaacgccaaccccaacgccaaccccaacgccaaccccaacgucgaccccaacgccaaccccaacgccaaccccaacgccaaccccaacgccaaccccaacgccaaccccaacgccaaccccaacgccaaccccaacgccaaccccaacgccaaccccaacgccaaccccaacgccaaccccaacgccaaccccaacgccaaccccaacgccaaccccaacgccaaccccaacgccaaccccaacgccaaccccaacgccaaccccaacaagaacaaccagggcaacggccagggccacaacaugcccaacgaccccaaccgcaacgucgacgagaacgccaacgccaacuccgccgucaagaacaacaacaacgaggagcccuccgacaagcacaucaaggaguaccucaacaagauccagaacucccucuccaccgaguggucccccugcuccgucaccugcggcaacggcauccagguccgcaucaagcccggcuccgccaacaagcccaaggacgagcucgacuacgccaacgacaucgagaagaagaucugcaagauggagaagugcuccuccgucuucaacgucgucaacuccucccccgucaccaacauggagaacaucaccuccggcuuccucggcccccuccucguccuccaggccggcuucuuccuccucacccgcauccucaccaucccccagucccucgacuccugguggaccucccucaacuuccucggcggcucccccgucugccucggccagaacucccagucccccaccuccaaccacucccccaccuccugcccccccaucugccccggcuaccgcuggaugugccuccgccgcuucaucaucuuccucuucauccuccuccucugccucaucuuccuccucguccuccucgacuaccagggcaugcuccccgucugcccccucauccccggcuccaccaccaccaacaccggccccugcaagaccugcaccacccccgcccagggcaacuccauguuccccuccugcugcugcaccaagcccaccgacggcaacugcaccugcauccccauccccuccuccugggccuucgccaaguaccucugggagugggccuccguccgcuucuccuggcucucccuccucguccccuucguccagugguucgucggccucucccccaccgucuggcucuccgccaucuggaugaugugguacuggggccccucccucuacuccaucgucucccccuucaucccccuccuccccaucuucuucugccucugggucuacaucugaggacuagucccuguucccagagcccacuuuuuuuucuuuuuuugaaauaaaauagccugucuuucagaucucaaaggcucuuuucagagccaccaaaaaaaaaaaaaaaaaaaaaaaaaaaaaaaaaaaaaaaaaaaaaaaaaaaaaaaaaaaaaaaaagaauu

SEQ ID NO: 9300 - RNA, 1622 nt, Artificial Sequence; identical to SEQ ID NO: 6890
  mRNA Design a-3 (hSL-A64-N5) comprising derived and/or modified sequence from Pf(3D7)__XP_001351122.1__HsALB_Pf-CSP(199-377)_L(PVTN)_HBsAg (opt2)

SEQ ID NO: 9301 - RNA, 1319 nt, Artificial Sequence
  mRNA Design a-3 (hSL-A64-N5) comprising derived and/or modified sequence from Pf(3D7)__XP_001351122.1__HsALB_Pf-CSP(19-272)_L(AAY)_Pf-CSP(346-3 75)_L(AAY)_Pf-CSP(310-327) (opt2)
aggagagggcgcuuggcuugcaaggacccugagcugcggcauugaagcacacccaacccaacucgacugaagucagccucacugaaccggaucugagaaucuucucucucugggcuugccagggcucuccgaaccuagcuagcauccucuucaauuccaacuagaaagcuuaccaugaagugggucaccuucaucucccuccucuuccucuucuccuccgccuacucccucuuccaggaguaccagugcuacggcuccuccuccaacacccgcguccucaacgagcucaacuacgacaacgccggcaccaaccucuacaacgagcucgagaugaacuacuacggcaagcaggagaacugguacucccucaagaagaacucccgcucccucggcgagaacgacgacggcaacaacgaggacaacgagaagcuccgcaagcccaagcacaagaagcucaagcagcccgccgacggcaaccccgaccccaacgccaaccccaacgucgaccccaacgccaaccccaacgucgaccccaacgccaaccccaacgucgaccccaacgccaaccccaacgccaaccccaacgccaaccccaacgccaaccccaacgccaaccccaacgccaaccccaacgccaaccccaacgccaaccccaacgccaaccccaacgccaaccccaacgccaaccccaacgccaaccccaacgccaaccccaacgccaaccccaacgccaaccccaacgccaaccccaacgccaaccccaacgucgaccccaacgccaaccccaacgccaaccccaacgccaaccccaacgccaaccccaacgccaaccccaacgccaaccccaacgccaaccccaacgccaaccccaacgccaaccccaacgccaaccccaacgccaaccccaacgccaaccccaacgccaaccccaacgccaaccccaacgccaaccccaacgccaaccccaacgccaaccccaacgccaaccccgccgccuacaucaagcccggcuccgccaacaagcccaaggacgagcucgacuacgccaacgacaucgagaagaagaucugcaagauggagaagugcuccgccgccuacgagcccuccgacaagcacaucaaggaguaccucaacaagauccagaacucccucugaggacuagucccuguucccagagcccacuuuuuuuucuuuuuuugaaauaaaauagccugucuuucagaucucaaaggcucuuuucagagccaccaaaaaaaaaaaaaaaaaaaaaaaaaaaaaaaaaaaaaaaaaaaaaaaaaaaaaaaaaaaaaaaaagaauu

SEQ ID NO: 9302 - RNA, 1367 nt, Artificial Sequence
  mRNA Design a-3 (hSL-A64-N5) comprising derived and/or modified sequence from Pf(3D7)__XP_001351122.1__HsALB_Pf-CSP(19-272)_L(AAY)_Pf-CSP(346-3 75)_L(AAY)_Pf-CSP(310-327)_L(AAY)_PADRE (opt2)
aggagagggcgcuuggcuugcaaggacccugagcugcggcauugaagcacacccaacccaacucgacugaagucagccucacugaaccggaucugagaaucuucucucucugggcuugccagggcucuccgaaccuagcuagcauccucuucaauuccaacuagaaagcuuaccaugaagugggucaccuucaucucccuccucuuccucuucuccuccgccuacucccucuuccaggaguaccagugcuacggcuccuccuccaacacccgcguccucaacgagcucaacuacgacaacgccggcaccaaccucuacaacgagcucgagaugaacuacuacggcaagcaggagaacugguacucccucaagaagaacucccgcucccucggcgagaacgacgacggcaacaacgaggacaacgagaagcuccgcaagcccaagcacaagaagcucaagcagcccgccgacggcaaccccgaccccaacgccaaccccaacgucgaccccaacgccaaccccaacgucgaccccaacgccaaccccaacgucgaccccaacgccaaccccaacgccaaccccaacgccaaccccaacgccaaccccaacgccaaccccaacgccaaccccaacgccaaccccaacgccaaccccaacgccaaccccaacgccaaccccaacgccaaccccaacgccaaccccaacgccaaccccaacgccaaccccaacgccaaccccaacgccaaccccaacgccaaccccaacgucgaccccaacgccaaccccaacgccaaccccaacgccaaccccaacgccaaccccaacgccaaccccaacgccaaccccaacgccaaccccaacgccaaccccaacgccaaccccaacgccaaccccaacgccaaccccaacgccaaccccaacgccaaccccaacgccaaccccaacgccaaccccaacgccaaccccaacgccaaccccaacgccaaccccgccgccuacaucaagcccggcuccgccaacaagcccaaggacgagcucgacuacgccaacgacaucgagaagaagaucugcaagauggagaagugcuccgccgccuacgagcccuccgacaagcacaucaaggaguaccucaacaagauccagaacucccucgccgccuacgccaaguucgucgccgccuggacccucaaggccgccgccugaggacuagucccuguucccagagcccacuuuuuuuucuuuuuuugaaauaaaauagccugucuuucagaucucaaaggcucuuuucagagccaccaaaaaaaaaaaaaaaaaaaaaaaaaaaaaaaaaaaaaaaaaaaaaaaaaaaaaaaaaaaaaaaaagaauu

SEQ ID NO: 9303 - RNA, 1367 nt, Artificial Sequence
  mRNA Design a-3 (hSL-A64-N5) comprising derived and/or modified sequence from Pf(3D7)__XP_001351122.1__HsALB_Pf-CSP(19-272)_L(AAY)_Pf-CSP(310-3 27)_L(AAY)_Pf-CSP(346-375)_L(AAY)_PADRE (opt2)
aggagagggcgcuuggcuugcaaggacccugagcugcggcauugaagcacacccaacccaacucgacugaagucagccucacugaaccggaucugagaaucuucucucucugggcuugccagggcucuccgaaccuagcuagcauccucuucaauuccaacuagaaagcuuaccaugaagugggucaccuucaucucccuccucuuccucuucuccuccgccuacucccucuuccaggaguaccagugcuacggcuccuccuccaacacccgcguccucaacgagcucaacuacgacaacgccggcaccaaccucuacaacgagcucgagaugaacuacuacggcaagcaggagaacugguacucccucaagaagaacucccgcucccucggcgagaacgacgacggcaacaacgaggacaacgagaagcuccgcaagcccaagcacaagaagcucaagcagcccgccgacggcaaccccgaccccaacgccaaccccaacgucgaccccaacgccaaccccaacgucgaccccaacgccaaccccaacgucgaccccaacgccaaccccaacgccaaccccaacgccaaccccaacgccaaccccaacgccaaccccaacgccaaccccaacgccaaccccaacgccaaccccaacgccaaccccaacgccaaccccaacgccaaccccaacgccaaccccaacgccaaccccaacgccaaccccaacgccaaccccaacgccaaccccaacgccaaccccaacgucgaccccaacgccaaccccaacgccaaccccaacgccaaccccaacgccaaccccaacgccaaccccaacgccaaccccaacgccaaccccaacgccaaccccaacgccaaccccaacgccaaccccaacgccaaccccaacgccaaccccaacgccaaccccaacgccaaccccaacgccaaccccaacgccaaccccaacgccaaccccaacgccaaccccgccgccuacgagcccuccgacaagcacaucaaggaguaccucaacaagauccagaacucccucgccgccuacaucaagcccggcuccgccaacaagcccaaggacgagcucgacuacgccaacgacaucgagaagaagaucugcaagauggagaagugcuccgccgccuacgccaaguucgucgccgccuggacccucaaggccgccgccugaggacuagucccuguucccagagcccacuuuuuuuucuuuuuuugaaauaaaauagccugucuuucagaucucaaaggcucuuuucagagccaccaaaaaaaaaaaaaaaaaaaaaaaaaaaaaaaaaaaaaaaaaaaaaaaaaaaaaaaaaaaaaaaaagaauu

SEQ ID NO: 9304 - RNA, 1421 nt, Artificial Sequence
  mRNA Design a-3 (hSL-A64-N5) comprising derived and/or modified sequence from Pf(3D7)__XP_001351122.1__HsALB_Pf-CSP(19-272)_L(AAY)_Pf-CSP(310-3 27)_L(AAY)_Pf-CSP(346-375)_L(AAY)_PADRE_L(AAY)_P2 (opt2)
aggagagggcgcuuggcuugcaaggacccugagcugcggcauugaagcacacccaacccaacucgacugaagucagccucacugaaccggaucugagaaucuucucucucugggcuugccagggcucuccgaaccuagcuagcauccucuucaauuccaacuagaaagcuuaccaugaagugggucaccuucaucucccuccucuuccucuucuccuccgccuacucccucuuccaggaguaccagugcuacggcuccuccuccaacacccgcguccucaacgagcucaacuacgacaacgccggcaccaaccucuacaacgagcucgagaugaacuacuacggcaagcaggagaacugguacucccucaagaagaacucccgcucccucggcgagaacgacgacggcaacaacgaggacaacgagaagcuccgcaagcccaagcacaagaagcucaagcagcccgccgacggcaaccccgaccccaacgccaaccccaacgucgaccccaacgccaaccccaacgucgaccccaacgccaaccccaacgucgaccccaacgccaaccccaacgccaaccccaacgccaaccccaacgccaaccccaacgccaaccccaacgccaaccccaacgccaaccccaacgccaaccccaacgccaaccccaacgccaaccccaacgccaaccccaacgccaaccccaacgccaaccccaacgccaaccccaacgccaaccccaacgccaaccccaacgccaaccccaacgucgaccccaacgccaaccccaacgccaaccccaacgccaaccccaacgccaaccccaacgccaaccccaacgccaaccccaacgccaaccccaacgccaaccccaacgccaaccccaacgccaaccccaacgccaaccccaacgccaaccccaacgccaaccccaacgccaaccccaacgccaaccccaacgccaaccccaacgccaaccccaacgccaaccccgccgccuacgagcccuccgacaagcacaucaaggaguaccucaacaagauccagaacucccucgccgccuacaucaagcccggcuccgccaacaagcccaaggacgagcucgacuacgccaacgacaucgagaagaagaucugcaagauggagaagugcuccgccgccuacgccaaguucgucgccgccuggacccucaaggccgccgccgccgccuaccaguacaucaaggccaacuccaaguucaucggcaucaccgagcucugaggacuagucccuguucccagagcccacuuuuuuuucuuuuuuugaaauaaaauagccugucuuucagaucucaaaggcucuuuucagagccaccaaaaaaaaaaaaaaaaaaaaaaaaaaaaaaaaaaaaaaaaaaaaaaaaaaaaaaaaaaaaaaaaagaauu

SEQ ID NO: 9305 - RNA, 1385 nt, Artificial Sequence
  mRNA Design a-3 (hSL-A64-N5) comprising derived and/or modified sequence from Pf(3D7)__XP_001351122.1__HsALB_Pf-CSP(19-272)_L(AAY)_Pf-CSP(310-3 27)_Linker (AAY)_Pf-CSP(346-397) (opt2)
aggagagggcgcuuggcuugcaaggacccugagcugcggcauugaagcacacccaacccaacucgacugaagucagccucacugaaccggaucugagaaucuucucucucugggcuugccagggcucuccgaaccuagcuagcauccucuucaauuccaacuagaaagcuuaccaugaagugggucaccuucaucucccuccucuuccucuucuccuccgccuacucccucuuccaggaguaccagugcuacggcuccuccuccaacacccgcguccucaacgagcucaacuacgacaacgccggcaccaaccucuacaacgagcucgagaugaacuacuacggcaagcaggagaacugguacucccucaagaagaacucccgcucccucggcgagaacgacgacggcaacaacgaggacaacgagaagcuccgcaagcccaagcacaagaagcucaagcagcccgccgacggcaaccccgaccccaacgccaaccccaacgucgaccccaacgccaaccccaacgucgaccccaacgccaaccccaacgucgaccccaacgccaaccccaacgccaaccccaacgccaaccccaacgccaaccccaacgccaaccccaacgccaaccccaacgccaaccccaacgccaaccccaacgccaaccccaacgccaaccccaacgccaaccccaacgccaaccccaacgccaaccccaacgccaaccccaacgccaaccccaacgccaaccccaacgccaaccccaacgucgaccccaacgccaaccccaacgccaaccccaacgccaaccccaacgccaaccccaacgccaaccccaacgccaaccccaacgccaaccccaacgccaaccccaacgccaaccccaacgccaaccccaacgccaaccccaacgccaaccccaacgccaaccccaacgccaaccccaacgccaaccccaacgccaaccccaacgccaaccccaacgccaaccccgccgccuacgagcccuccgacaagcacaucaaggaguaccucaacaagauccagaacucccucgccgccuacaucaagcccggcuccgccaacaagcccaaggacgagcucgacuacgccaacgacaucgagaagaagaucugcaagauggagaagugcuccuccgucuucaacgucgucaacuccuccaucggccucaucaugguccucuccuuccucuuccucaacugaggacuagucccuguucccagagcccacuuuuuuuucuuuuuuugaaauaaaauagccugucuuucagaucucaaaggcucuuuucagagccaccaaaaaaaaaaaaaaaaaaaaaaaaaaaaaaaaaaaaaaaaaaaaaaaaaaaaaaaaaaaaaaaaagaauu

SEQ ID NO: 9306 - RNA, 1985 nt, Artificial Sequence
  mRNA Design a-3 (hSL-A64-N5) comprising derived and/or modified sequence from Pf(3D7)__XP_001351122.1__LumSynt_L(GGS4-GGG)_Pf-CSP(19-397) (opt3)
aggagagggcgcuuggcuugcaaggacccugagcugcggcauugaagcacacccaacccaacucgacugaagucagccucacugaaccggaucugagaaucuucucucucugggcuugccagggcucuccgaaccuagcuagcauccucuucaauuccaacuagaaagcuuaccaugcagaucuacgagggcaagcugaccgccgaagggcucagauucggaauuguggcuagcagguuuaaccacgcacuugucgaccggcugguugagggugccauagaugcgaucgugcgccauggcgggcgagaagaggacauuacauugguacgugugcccggauccugggaaaucccugucgcugccggcgaguuagcaagaaaagaggauauugacgccgugaucgcuauagguguucugaucaggggagcaacuccacacuucgauuauauugccucugaagugucaaaggggcuagcugaccucagucuggagcuucggaaaccgaucacguuuggcgucauuaccgccgauacacuggaacaagcgaucgagcgcgcaggcacuaagcaugggaauaaaggaugggaggccgcuuugagcgccauagaaauggcaaaccucuucaagucccugagagguggcucugggggaucgggcgguucagggggaagcggcggcgggcuguuucaggaguaccagugcuauggaaguuccucuaauaccagggugcucaacgaauuaaauuacgacaacgcugguacaaaucuguauaacgagcuugaaaugaauuacuauggcaagcaggagaacugguacagcuugaaaaagaacucccggucacugggggagaaugaugacggaaauaacgaagauaaugagaaacuacgcaagcccaaacacaagaagcucaaacaaccugccgacggcaacccagaucccaacgcgaauccuaacguagacccaaaugccaaccccaauguugacccuaacgcaaauccaaacguggauccgaaugcuaaccccaaugccaacccuaaugcuaacccaaaugccaaccccaacgcaaauccuaacgccaauccaaacgcuaaucccaacgcgaauccgaacgcaaauccuaacgccaaucccaacgcuaauccaaacgccaauccuaacgcaaaccccaaugccaacccaaaugcuaaccccaaugccaacccuaaugcaaacccaaaugucgacccgaacgcgaaucccaacgcuaauccuaacgccaauccaaacgcaaaccccaaugccaacccuaaugcuaacccaaaugccaaccccaaugcaaacccgaaugcuaacccuaaugccaacccaaaugcgaaccccaaugccaacccuaaugcuaaccccaacgcaaauccaaacgccaauccuaacgcuaaucccaacgccaauccaaacgcaaauccgaacaagaauaaccaggguaaugggcagggccauaacaugccuaaugaucccaaccgaaacguggacgaaaaugcgaacgccaauagugcugugaaaaacaauaacaaugaggaaccaagcgauaagcacauuaaagaguaccugaacaagauccaaaauucucuuuccaccgaguggucacccugcagcgucacuugcggaaacggcauucagguuagaaucaaaccugggagugccaauaagccaaaggacgaacuggauuaugcaaacgacaucgagaaaaagauuuguaaaauggaaaaguguucuuccguguucaauguagugaacagcucgauaggauugaucaugguccucucuuuucuguucuuaaauugaggacuagucccuguucccagagcccacuuuuuuuucuuuuuuugaaauaaaauagccugucuuucagaucucaaaggcucuuuucagagccaccaaaaaaaaaaaaaaaaaaaaaaaaaaaaaaaaaaaaaaaaaaaaaaaaaaaaaaaaaaaaaaaaagaauu

SEQ ID NO: 9307 - RNA, 1847 nt, Artificial Sequence
  mRNA Design a-3 (hSL-A64-N5) comprising derived and/or modified sequence from Pf(3D7)__XP_001351122.1__HsALB_Pf-CSP(19-272)_L(PVTN)_HBsAg (opt3)
aggagagggcgcuuggcuugcaaggacccugagcugcggcauugaagcacacccaacccaacucgacugaagucagccucacugaaccggaucugagaaucuucucucucugggcuugccagggcucuccgaaccuagcuagcauccucuucaauuccaacuagaaagcuuaccaugaagugggugaccuucaucagccugcucuuucuuuucuccucugccuacucacuguuucaggaguaucaaugcuacggcaguagcuccaacacaagagucuugaaugaauuaaacuaugacaaugcugggacuaaccuguacaaugagcuagaaaugaacuauuacggaaaacaggagaauugguauucucucaagaaaaacucgaggucacugggugaaaaugaugacggcaacaaugaggauaacgagaaacuucggaagcccaagcacaagaaacugaagcagccugcagacgggaauccagauccgaacgccaaucccaacguugacccuaacgcgaauccaaacguggaucccaaugcuaacccuaauguagacccaaacgccaaucccaacgcaaauccuaacgccaauccaaacgcuaauccgaacgcaaaucccaacgccaacccuaaugcuaacccaaaugccaaccccaaugcgaacccuaaugcaaacccaaaugccaaccccaaugcuaacccgaaugccaacccuaaugcaaaccccaacgcuaauccaaacgccaauccuaacgcgaaucccaacguggauccaaaugccaaccccaaugcaaacccuaaugcuaacccaaaugccaacccgaaugcuaaccccaacgccaauccuaacgcaaauccaaacgccaaucccaacgcuaauccuaacgcgaauccaaacgcaaaucccaacgccaauccgaacgcuaauccuaacgccaauccaaacgcaaaccccaaugccaacccuaaugcuaaccccaaugccaacccaccugucacgaauauggaaaacauuaccagcggauucuugggcccccuccuggugcugcaggcaggguuuuuccucuuaacacgcauacugacuaucccacaaagucuugacuccugguggaccucuuugaauuuucuggguggaagcccgguuugucuaggccagaacucccagucaccuacaaguaaucauagccccaccucuugcccacccauuuguccuggcuaccgauggaugugccuccguagauucaucauuuuucuguucauccuucuguugugucucauauuucuguuagugcugcucgauuaccaggggaugcuuccagucugcccccugaucccuggauccacuacaaccaacacggguccguguaaaacuugcaccacaccagcgcaaggcaauucaauguuccccagcuguugcuguacuaagccuaccgacgggaacugcacaugcauuccaauccccaguucuugggcuuuugccaaauauuugugggagugggcauccgugagguucagcuggcuaucgcugcucguaccuuucguucagugguuugugggacugucuccgaccgucuggcuuuccgccauuuggaugaugugguacuggggccccucacuguauaguaucgugagcccauucauaccuuugcuccccaucuuuuucugucuguggguguacauuugaggacuagucccuguucccagagcccacuuuuuuuucuuuuuuugaaauaaaauagccugucuuucagaucucaaaggcucuuuucagagccaccaaaaaaaaaaaaaaaaaaaaaaaaaaaaaaaaaaaaaaaaaaaaaaaaaaaaaaaaaaaaaaaaagaauu

SEQ ID NO: 9308 - RNA, 1964 nt, Artificial Sequence
  mRNA Design a-3 (hSL-A64-N5) comprising derived and/or modified sequence from Pf(3D7)__XP_001351122.1__HsALB_Pf-CSP(19-272)_L(AAY)_Pf-CSP(346-3 65)_L(AAY)_PADRE_L(PVTN)_HBsAg (opt3)
aggagagggcgcuuggcuugcaaggacccugagcugcggcauugaagcacacccaacccaacucgacugaagucagccucacugaaccggaucugagaaucuucucucucugggcuugccagggcucuccgaaccuagcuagcauccucuucaauuccaacuagaaagcuuaccaugaagugggugaccuucaucagccugcucuuucuuuucuccucugccuacucacuguuucaggaguaucaaugcuacggcaguagcuccaacacaagagucuugaaugaauuaaacuaugacaaugcugggacuaaccuguacaaugagcuagaaaugaacuauuacggaaaacaggagaauugguauucucucaagaaaaacucgaggucacugggugaaaaugaugacggcaacaaugaggauaacgagaaacuucggaagcccaagcacaagaaacugaagcagccugcagacgggaauccagauccgaacgccaaucccaacguugacccuaacgcgaauccaaacguggaucccaaugcuaacccuaauguagacccaaacgccaaucccaacgcaaauccuaacgccaauccaaacgcuaauccgaacgcaaaucccaacgccaacccuaaugcuaacccaaaugccaaccccaaugcgaacccuaaugcaaacccaaaugccaaccccaaugcuaacccgaaugccaacccuaaugcaaaccccaacgcuaauccaaacgccaauccuaacgcgaaucccaacguggauccaaaugccaaccccaaugcaaacccuaaugcuaacccaaaugccaacccgaaugcuaaccccaacgccaauccuaacgcaaauccaaacgccaaucccaacgcuaauccuaacgcgaauccaaacgcaaaucccaacgccaauccgaacgcuaauccuaacgccaauccaaacgcaaaccccaaugccaacccuaaugcuaaccccaaugccaacccagcagcguacauuaaaccuggaagcgcuaauaagcccaaagacgaauuggauuacgccaacgacauagaggcagccuaugcuaaguucgucgccgcauggacgcucaaggcugccgcgccagugaccaauauggaaaacaucacaaguggcuuucuggguccgcugcucguuuuacaggccggguucuuucugcuuacucgcauuuugaccaucccucaaucccuggauucuugguggacaagccuaaauuuccucggaggcucccccgugugucugggccagaacucacagaguccaaccagcaaucauucucccacuuccugcccuccaauuugucccggguaccgauggaugugccuucguagauuuaucauauuccuguuuaucuugcuccuguguuuaauuuuccugcucguccuucuggacuaucagggaauguugccugugugcccgcuaaucccagguucaacaaccacgaacacuggccccuguaaaaccugcacaacuccugcucaagggaauagcauguuuccaaguuguugcuguaccaagcccacagacggaaacuguaccugcauuccuaucccgucuuccugggcauucgccaaauaccugugggagugggcuagcguaagguucucguggcucucucugcuuguucccuuugugcagugguucgucggccuguccccaacggugugguugucagccauauggaugaugugguauugggguccuagucucuacagcauugugucccccuuuaucccacuguuaccuauuuucuuuugccugugggucuauaucugaggacuagucccuguucccagagcccacuuuuuuuucuuuuuuugaaauaaaauagccugucuuucagaucucaaaggcucuuuucagagccaccaaaaaaaaaaaaaaaaaaaaaaaaaaaaaaaaaaaaaaaaaaaaaaaaaaaaaaaaaaaaaaaaagaauu

SEQ ID NO: 9309 - RNA, 2183 nt, Artificial Sequence
  mRNA Design a-3 (hSL-A64-N5) comprising derived and/or modified sequence from Pf(3D7)__XP_001351122.1__HsALB_Pf-CSP(19-384)_L(PVTN)_HBsAg (opt3)
aggagagggcgcuuggcuugcaaggacccugagcugcggcauugaagcacacccaacccaacucgacugaagucagccucacugaaccggaucugagaaucuucucucucugggcuugccagggcucuccgaaccuagcuagcauccucuucaauuccaacuagaaagcuuaccaugaagugggugaccuucaucagccugcucuuucuuuucuccucugccuacucacuguuucaggaguaucaaugcuacggcaguagcuccaacacaagagucuugaaugaauuaaacuaugacaaugcugggacuaaccuguacaaugagcuagaaaugaacuauuacggaaaacaggagaauugguauucucucaagaaaaacucgaggucacugggugaaaaugaugacggcaacaaugaggauaacgagaaacuucggaagcccaagcacaagaaacugaagcagccugcagacgggaauccagauccgaacgccaaucccaacguugacccuaacgcgaauccaaacguggaucccaaugcuaacccuaauguagacccaaacgccaaucccaacgcaaauccuaacgccaauccaaacgcuaauccgaacgcaaaucccaacgccaacccuaaugcuaacccaaaugccaaccccaaugcgaacccuaaugcaaacccaaaugccaaccccaaugcuaacccgaaugccaacccuaaugcaaaccccaacgcuaauccaaacgccaauccuaacgcgaaucccaacguggauccaaaugccaaccccaaugcaaacccuaaugcuaacccaaaugccaacccgaaugcuaaccccaacgccaauccuaacgcaaauccaaacgccaaucccaacgcuaauccuaacgcgaauccaaacgcaaaucccaacgccaauccgaacgcuaauccuaacgccaauccaaacgcaaaccccaaugccaacccuaaugcuaaccccaaugccaacccaaauaaaaacaaucagggaaacggccaaggucauaauaugccuaacgaccccaaucgcaacgucgaugaaaaugcaaacgcgaacagcgcugugaagaauaacaauaacgaggaaccaagugacaaacacauuaaggaguacuugaauaagauacagaacucccucucuacggaguggagcccguguuccguuaccugcgggaauggaauccaggugcgaauuaaaccuggcucagccaacaagcccaaagaugaacuggacuacgcaaaugacaucgagaagaaaauuuguaagauggaaaaaugcaguagcgucuucaacgugguaaauucuuccccaguuacaaacauggagaauaucacuucaggcuuucuggggccccucuuagugcugcaggccggauucuuucuuuugacccguauacugacaaucccucaaagccuagauaguugguggaccucucucaacuuccuggguggcuccccagucugucuugggcagaauagccagucgcccacuucuaaccauuccccuacaucaugcccgccaauuugucccggauauagauggaugugccugaggcgguuuaucauuuucuuguuuauccuccuguuaugucugauauuccuccuugugcuguuggacuaccagggcaugcuaccugugugcccacugauucccgguaguaccacgacuaacaccgggccuuguaagacaugcacuaccccggcucaaggaaauagcauguuucccuccugcuguugcacaaagccaaccgauggcaacuguacgugcaucccuauucccucuagcugggccuucgcaaaauaucucugggaaugggcuucaguccgcuucaguuggcugucccuucugguuccauuugugcagugguucguaggcuugagcccuacuguguggcucucugccaucuggaugaugugguacugggggcccucacuguauaguaucgucagcccauuuauuccguuacugccuauauucuuuugucuauggguguacaucugaggacuagucccuguucccagagcccacuuuuuuuucuuuuuuugaaauaaaauagccugucuuucagaucucaaaggcucuuuucagagccaccaaaaaaaaaaaaaaaaaaaaaaaaaaaaaaaaaaaaaaaaaaaaaaaaaaaaaaaaaaaaaaaaagaauu

SEQ ID NO: 9310 - RNA, 2000 nt, Artificial Sequence
  mRNA Design a-3 (hSL-A64-N5) comprising derived and/or modified sequence from Pf(3D7)__XP_001351122.1__HsALB_Pf-CSP(19-384)_L(SGG)_Ferritin (opt3)
aggagagggcgcuuggcuugcaaggacccugagcugcggcauugaagcacacccaacccaacucgacugaagucagccucacugaaccggaucugagaaucuucucucucugggcuugccagggcucuccgaaccuagcuagcauccucuucaauuccaacuagaaagcuuaccaugaagugggugaccuucaucagccugcucuuucuuuucuccucugccuacucacuguuucaggaguaucaaugcuacggcaguagcuccaacacaagagucuugaaugaauuaaacuaugacaaugcugggacuaaccuguacaaugagcuagaaaugaacuauuacggaaaacaggagaauugguauucucucaagaaaaacucgaggucacugggugaaaaugaugacggcaacaaugaggauaacgagaaacuucggaagcccaagcacaagaaacugaagcagccugcagacgggaauccagauccgaacgccaaucccaacguugacccuaacgcgaauccaaacguggaucccaaugcuaacccuaauguagacccaaacgccaaucccaacgcaaauccuaacgccaauccaaacgcuaauccgaacgcaaaucccaacgccaacccuaaugcuaacccaaaugccaaccccaaugcgaacccuaaugcaaacccaaaugccaaccccaaugcuaacccgaaugccaacccuaaugcaaaccccaacgcuaauccaaacgccaauccuaacgcgaaucccaacguggauccaaaugccaaccccaaugcaaacccuaaugcuaacccaaaugccaacccgaaugcuaaccccaacgccaauccuaacgcaaauccaaacgccaaucccaacgcuaauccuaacgcgaauccaaacgcaaaucccaacgccaauccgaacgcuaauccuaacgccaauccaaacgcaaaccccaaugccaacccuaaugcuaaccccaaugccaacccaaauaaaaacaaucagggaaacggccaaggucauaauaugccuaacgaccccaaucgcaacgucgaugaaaaugcaaacgcgaacagcgcugugaagaauaacaauaacgaggaaccaagugacaaacacauuaaggaguacuugaauaagauacagaacucccucucuacggaguggagcccguguuccguuaccugcgggaauggaauccaggugcgaauuaaaccuggcucagccaacaagcccaaagaugaacuggacuacgcaaaugacaucgagaagaaaauuuguaagauggaaaaaugcaguagcgucuucaacgugguaaauucuuccucaggcgggcugagcaaggauaucauaaagcucuuaaacgagcagguuaauaaagaaaugaacaguucuaaucuguauauguccaugagcucgugguguuacacacauucucuugacggagccgguuuguuucuguucgaucacgcugccgaggaguaugaacaugcaaagaaacuaaucauuuuucucaacgagaacaaugugccaguccaacugacuuccaucucagcucccgaacacaaguucgagggccuuacccagauuuuucagaaagccuacgaacacgagcagcauaucagugagagcauaaacaauauuguggaccacgcgaucaaguccaaggaucaugccacauucaacuuucugcaaugguauguggcugaacagcacgaggaagaggucuuguucaaagacauucucgauaagaucgaacugaucgggaaugagaaccacggauuauaccuggcagaccaguauguuaaaggcauugccaagucucguaaaagcugaggacuagucccuguucccagagcccacuuuuuuuucuuuuuuugaaauaaaauagccugucuuucagaucucaaaggcucuuuucagagccaccaaaaaaaaaaaaaaaaaaaaaaaaaaaaaaaaaaaaaaaaaaaaaaaaaaaaaaaaaaaaaaaaagaauu

SEQ ID NO: 9311 - RNA, 1961 nt, Artificial Sequence
  mRNA Design a-3 (hSL-A64-N5) comprising derived and/or modified sequence from Pf(3D7)__XP_001351122.1__HsALB_Pf-CSP(93-384)_L(PVTN)_HBsAg (opt3)
aggagagggcgcuuggcuugcaaggacccugagcugcggcauugaagcacacccaacccaacucgacugaagucagccucacugaaccggaucugagaaucuucucucucugggcuugccagggcucuccgaaccuagcuagcauccucuucaauuccaacuagaaagcuuaccaugaagugggugaccuucaucagccugcucuuucuuuucuccucugccuacucaaaacugaagcagcccgcugacggcaacccugauccaaaugcaaacccgaaugucgaccccaacgccaauccuaacguugauccaaaugcgaaccccaauguggacccuaacgcuaauccaaacgccaaucccaacgcaaauccuaacgccaacccaaaugcuaacccgaaugcaaaccccaaugccaacccuaaugcuaacccaaaugccaaccccaaugcgaacccuaaugcaaacccaaaugccaaccccaacgcuaauccgaacgccaauccuaacgcaaaucccaacgcuaauccaaacgccaauccuaacguagaucccaaugcgaacccaaaugccaaccccaaugcaaacccuaacgcuaauccaaacgccaauccgaacgcuaaucccaacgccaauccuaacgcaaauccaaacgccaaucccaacgcuaauccuaacgcgaauccaaacgcaaaccccaaugccaacccgaaugcuaacccuaaugccaacccaaaugcaaaccccaaugccaacccuaaugcuaaccccaauaaaaacaaucaagggaacggacagggucacaauaugccaaacgacccuaacagaaauguggaugagaacgccaaugcaaacagugcggucaagaauaacaauaacgaggaacccagcgacaaacauauuaaggaauauuugaauaagauacagaacuccuuaucuacagaguggucgccaugcucagugacuuguggcaaugggauccagguuaggauuaaaccgggaagcgcuaacaagccuaaagaugaacuggacuacgccaaugauaucgagaagaaaauuugcaagauggagaaguguaguuccguguuuaacgucguaaauucuagccccgugacgaacauggaaaacaucaccuccggcuuccuagguccacuccugguucuucaagcaggguuuuuccuguugacacggauacucacuaucccccagucacuggacaguugguggaccagccugaauuuucucggaggcucuccugugugcuuaggccagaacucccagucaccaacaagcaaucacagucccaccucuuguccuccgauuugcccaggguaucgcuggaugugucugcgacguuucaucauuuuucuuuucaucuugcugcuaugccucauauuucugcuuguccuguuggauuaccaaggaaugcuccccguguguccucugauuccagguuccacuacaaccaacacgggccccugcaaaacuuguaccacuccugcccaggggaauagcauguucccgucgugcugcuguacaaagcccaccgacggaaacugcacauguaucccaauuccuucuuccugggcuuuugccaaauauuuaugggagugggcaucagugagauucaguuggcugagccuccuuguccccuucguucagugguuugugggccuguccccaaccguaugguugucugcuaucuggaugaugugguacugggguccuagccuauauucaaucgugagucccuucauuccacugcucccgauauuuuucugccugugggucuacaucugaggacuagucccuguucccagagcccacuuuuuuuucuuuuuuugaaauaaaauagccugucuuucagaucucaaaggcucuuuucagagccaccaaaaaaaaaaaaaaaaaaaaaaaaaaaaaaaaaaaaaaaaaaaaaaaaaaaaaaaaaaaaaaaaagaauu

SEQ ID NO: 9312 - RNA, 1622 nt, Artificial Sequence; identical to SEQ ID NO: 6920
  mRNA Design a-3 (hSL-A64-N5) comprising derived and/or modified sequence from Pf(3D7)__XP_001351122.1__HsALB_Pf-CSP(199-377)_L(PVTN)_HBsAg (opt3)

SEQ ID NO: 9313 - RNA, 1319 nt, Artificial Sequence
  mRNA Design a-3 (hSL-A64-N5) comprising derived and/or modified sequence from Pf(3D7)__XP_001351122.1__HsALB_Pf-CSP(19-272)_L(AAY)_Pf-CSP(346-3 75)_L(AAY)_Pf-CSP(310-327) (opt3)
aggagagggcgcuuggcuugcaaggacccugagcugcggcauugaagcacacccaacccaacucgacugaagucagccucacugaaccggaucugagaaucuucucucucugggcuugccagggcucuccgaaccuagcuagcauccucuucaauuccaacuagaaagcuuaccaugaagugggugaccuucaucagccugcucuuucuuuucuccucugccuacucacuguuucaggaguaucaaugcuacggcaguagcuccaacacaagagucuugaaugaauuaaacuaugacaaugcugggacuaaccuguacaaugagcuagaaaugaacuauuacggaaaacaggagaauugguauucucucaagaaaaacucgaggucacugggugaaaaugaugacggcaacaaugaggauaacgagaaacuucggaagcccaagcacaagaaacugaagcagccugcagacgggaauccagauccgaacgccaaucccaacguugacccuaacgcgaauccaaacguggaucccaaugcuaacccuaauguagacccaaacgccaaucccaacgcaaauccuaacgccaauccaaacgcuaauccgaacgcaaaucccaacgccaacccuaaugcuaacccaaaugccaaccccaaugcgaacccuaaugcaaacccaaaugccaaccccaaugcuaacccgaaugccaacccuaaugcaaaccccaacgcuaauccaaacgccaauccuaacgcgaaucccaacguggauccaaaugccaaccccaaugcaaacccuaaugcuaacccaaaugccaacccgaaugcuaaccccaacgccaauccuaacgcaaauccaaacgccaaucccaacgcuaauccuaacgcgaauccaaacgcaaaucccaacgccaauccgaacgcuaauccuaacgccaauccaaacgcaaaccccaaugccaacccuaaugcuaaccccaaugccaacccagcagcguacauuaaaccuggaagcgcuaauaagcccaaagacgaauuggauuacgccaacgacauagagaagaagaucuguaaaauggaaaagugcagugcagccuaugagccauccgauaaacauauuaaggaguaccucaauaaaauccagaacucucugugaggacuagucccuguucccagagcccacuuuuuuuucuuuuuuugaaauaaaauagccugucuuucagaucucaaaggcucuuuucagagccaccaaaaaaaaaaaaaaaaaaaaaaaaaaaaaaaaaaaaaaaaaaaaaaaaaaaaaaaaaaaaaaaaagaauu

SEQ ID NO: 9314 - RNA, 1367 nt, Artificial Sequence
  mRNA Design a-3 (hSL-A64-N5) comprising derived and/or modified sequence from Pf(3D7)__XP_001351122.1__HsALB_Pf-CSP(19-272)_L(AAY)_Pf-CSP(346-3 75)_L(AAY)_Pf-CSP(310-327)_L(AAY)_PADRE (opt3)
aggagagggcgcuuggcuugcaaggacccugagcugcggcauugaagcacacccaacccaacucgacugaagucagccucacugaaccggaucugagaaucuucucucucugggcuugccagggcucuccgaaccuagcuagcauccucuucaauuccaacuagaaagcuuaccaugaagugggugaccuucaucagccugcucuuucuuuucuccucugccuacucacuguuucaggaguaucaaugcuacggcaguagcuccaacacaagagucuugaaugaauuaaacuaugacaaugcugggacuaaccuguacaaugagcuagaaaugaacuauuacggaaaacaggagaauugguauucucucaagaaaaacucgaggucacugggugaaaaugaugacggcaacaaugaggauaacgagaaacuucggaagcccaagcacaagaaacugaagcagccugcagacgggaauccagauccgaacgccaaucccaacguugacccuaacgcgaauccaaacguggaucccaaugcuaacccuaauguagacccaaacgccaaucccaacgcaaauccuaacgccaauccaaacgcuaauccgaacgcaaaucccaacgccaacccuaaugcuaacccaaaugccaaccccaaugcgaacccuaaugcaaacccaaaugccaaccccaaugcuaacccgaaugccaacccuaaugcaaaccccaacgcuaauccaaacgccaauccuaacgcgaaucccaacguggauccaaaugccaaccccaaugcaaacccuaaugcuaacccaaaugccaacccgaaugcuaaccccaacgccaauccuaacgcaaauccaaacgccaaucccaacgcuaauccuaacgcgaauccaaacgcaaaucccaacgccaauccgaacgcuaauccuaacgccaauccaaacgcaaaccccaaugccaacccuaaugcuaaccccaaugccaacccagcagcguacauuaaaccuggaagcgcuaauaagcccaaagacgaauuggauuacgccaacgacauagagaagaagaucuguaaaauggaaaagugcagugcagccuaugagccauccgauaaacauauuaaggaguaccucaauaaaauccagaacucucuggcugccuaugcaaaguucgucgcugccuggacgcugaaagcggccgcuugaggacuagucccuguucccagagcccacuuuuuuuucuuuuuuugaaauaaaauagccugucuuucagaucucaaaggcucuuuucagagccaccaaaaaaaaaaaaaaaaaaaaaaaaaaaaaaaaaaaaaaaaaaaaaaaaaaaaaaaaaaaaaaaaagaauu

SEQ ID NO: 9315 - RNA, 1367 nt, Artificial Sequence
  mRNA Design a-3 (hSL-A64-N5) comprising derived and/or modified sequence from Pf(3D7)__XP_001351122.1__HsALB_Pf-CSP(19-272)_L(AAY)_Pf-CSP(310-3 27)_L(AAY)_Pf-CSP(346-375)_L(AAY)_PADRE (opt3)
aggagagggcgcuuggcuugcaaggacccugagcugcggcauugaagcacacccaacccaacucgacugaagucagccucacugaaccggaucugagaaucuucucucucugggcuugccagggcucuccgaaccuagcuagcauccucuucaauuccaacuagaaagcuuaccaugaagugggugaccuucaucagccugcucuuucuuuucuccucugccuacucacuguuucaggaguaucaaugcuacggcaguagcuccaacacaagagucuugaaugaauuaaacuaugacaaugcugggacuaaccuguacaaugagcuagaaaugaacuauuacggaaaacaggagaauugguauucucucaagaaaaacucgaggucacugggugaaaaugaugacggcaacaaugaggauaacgagaaacuucggaagcccaagcacaagaaacugaagcagccugcagacgggaauccagauccgaacgccaaucccaacguugacccuaacgcgaauccaaacguggaucccaaugcuaacccuaauguagacccaaacgccaaucccaacgcaaauccuaacgccaauccaaacgcuaauccgaacgcaaaucccaacgccaacccuaaugcuaacccaaaugccaaccccaaugcgaacccuaaugcaaacccaaaugccaaccccaaugcuaacccgaaugccaacccuaaugcaaaccccaacgcuaauccaaacgccaauccuaacgcgaaucccaacguggauccaaaugccaaccccaaugcaaacccuaaugcuaacccaaaugccaacccgaaugcuaaccccaacgccaauccuaacgcaaauccaaacgccaaucccaacgcuaauccuaacgcgaauccaaacgcaaaucccaacgccaauccgaacgcuaauccuaacgccaauccaaacgcaaaccccaaugccaacccuaaugcuaaccccaaugccaacccagcagcguacgaaccuagcgacaaacauauuaaggaguacuugaauaaaauacagaacagucucgcugccuauaucaagcccggauccgcaaauaagccaaaagaugaacuggacuacgccaacgauauugagaagaaaaucuguaagauggagaaaugcucugcugccuaugcaaaguucgucgcugccuggacgcugaaagcggccgcuugaggacuagucccuguucccagagcccacuuuuuuuucuuuuuuugaaauaaaauagccugucuuucagaucucaaaggcucuuuucagagccaccaaaaaaaaaaaaaaaaaaaaaaaaaaaaaaaaaaaaaaaaaaaaaaaaaaaaaaaaaaaaaaaaagaauu

SEQ ID NO: 9316 - RNA, 1421 nt, Artificial Sequence
  mRNA Design a-3 (hSL-A64-N5) comprising derived and/or modified sequence from Pf(3D7)__XP_001351122.1__HsALB_Pf-CSP(19-272)_L(AAY)_Pf-CSP(310-3 27)_L(AAY)_Pf-CSP(346-375)_L(AAY)_PADRE_L(AAY)_P2 (opt3)
aggagagggcgcuuggcuugcaaggacccugagcugcggcauugaagcacacccaacccaacucgacugaagucagccucacugaaccggaucugagaaucuucucucucugggcuugccagggcucuccgaaccuagcuagcauccucuucaauuccaacuagaaagcuuaccaugaagugggugaccuucaucagccugcucuuucuuuucuccucugccuacucacuguuucaggaguaucaaugcuacggcaguagcuccaacacaagagucuugaaugaauuaaacuaugacaaugcugggacuaaccuguacaaugagcuagaaaugaacuauuacggaaaacaggagaauugguauucucucaagaaaaacucgaggucacugggugaaaaugaugacggcaacaaugaggauaacgagaaacuucggaagcccaagcacaagaaacugaagcagccugcagacgggaauccagauccgaacgccaaucccaacguugacccuaacgcgaauccaaacguggaucccaaugcuaacccuaauguagacccaaacgccaaucccaacgcaaauccuaacgccaauccaaacgcuaauccgaacgcaaaucccaacgccaacccuaaugcuaacccaaaugccaaccccaaugcgaacccuaaugcaaacccaaaugccaaccccaaugcuaacccgaaugccaacccuaaugcaaaccccaacgcuaauccaaacgccaauccuaacgcgaaucccaacguggauccaaaugccaaccccaaugcaaacccuaaugcuaacccaaaugccaacccgaaugcuaaccccaacgccaauccuaacgcaaauccaaacgccaaucccaacgcuaauccuaacgcgaauccaaacgcaaaucccaacgccaauccgaacgcuaauccuaacgccaauccaaacgcaaaccccaaugccaacccuaaugcuaaccccaaugccaacccagcagcguacgaaccuagcgacaaacauauuaaggaguacuugaauaaaauacagaacagucucgcugccuauaucaagcccggauccgcaaauaagccaaaagaugaacuggacuacgccaacgauauugagaagaaaaucuguaagauggagaaaugcucugcugccuaugcaaaguucgucgcugccuggacgcugaaagcggccgcugcagccuaccaauauauuaaggcuaauagcaaguuuaucggcauaaccgaacucugaggacuagucccuguucccagagcccacuuuuuuuucuuuuuuugaaauaaaauagccugucuuucagaucucaaaggcucuuuucagagccaccaaaaaaaaaaaaaaaaaaaaaaaaaaaaaaaaaaaaaaaaaaaaaaaaaaaaaaaaaaaaaaaaagaauu

SEQ ID NO: 9317 - RNA, 1385 nt, Artificial Sequence
  mRNA Design a-3 (hSL-A64-N5) comprising derived and/or modified sequence from Pf(3D7)__XP_001351122.1__HsALB_Pf-CSP(19-272)_L(AAY)_Pf-CSP(310-3 27)_Linker (AAY)_Pf-CSP(346-397) (opt3)
aggagagggcgcuuggcuugcaaggacccugagcugcggcauugaagcacacccaacccaacucgacugaagucagccucacugaaccggaucugagaaucuucucucucugggcuugccagggcucuccgaaccuagcuagcauccucuucaauuccaacuagaaagcuuaccaugaagugggugaccuucaucagccugcucuuucuuuucuccucugccuacucacuguuucaggaguaucaaugcuacggcaguagcuccaacacaagagucuugaaugaauuaaacuaugacaaugcugggacuaaccuguacaaugagcuagaaaugaacuauuacggaaaacaggagaauugguauucucucaagaaaaacucgaggucacugggugaaaaugaugacggcaacaaugaggauaacgagaaguuacggaaacccaagcacaagaaacugaagcagccugcagacgggaauccagauccgaacgccaaucccaacguugacccuaacgcgaauccaaacguggaucccaaugcuaacccuaauguagacccaaacgccaaucccaacgcaaauccuaacgccaauccaaacgcuaauccgaacgcaaaucccaacgccaacccuaaugcuaacccaaaugccaaccccaaugcgaacccuaaugcaaacccaaaugccaaccccaaugcuaacccgaaugccaacccuaaugcaaaccccaacgcuaauccaaacgccaauccuaacgcgaaucccaacguggauccaaaugccaaccccaaugcaaacccuaaugcuaacccaaaugccaacccgaaugcuaaccccaacgccaauccuaacgcaaauccaaacgccaaucccaacgcuaauccuaacgcgaauccaaacgcaaaucccaacgccaauccgaacgcuaauccuaacgccaauccaaacgcaaaccccaaugccaacccuaaugcuaaccccaaugccaacccagcagcguacgaaccuagcgacaaacauauuaaggaguacuugaauaaaauacagaacagucucgcugccuauaucaagcccggauccgcaaauaagccaaaagaugaacuggacuacgccaacgauauugagaagaaaaucuguaagauggagaaaugcucuagcgucuucaaugugguuaacuccucaauuggccugaucauggugcucaguuuucuuuuccugaauugaggacuagucccuguucccagagcccacuuuuuuuucuuuuuuugaaauaaaauagccugucuuucagaucucaaaggcucuuuucagagccaccaaaaaaaaaaaaaaaaaaaaaaaaaaaaaaaaaaaaaaaaaaaaaaaaaaaaaaaaaaaaaaaaagaauu

SEQ ID NO: 9318 - RNA, 1985 nt, Artificial Sequence
  mRNA Design a-3 (hSL-A64-N5) comprising derived and/or modified sequence from Pf(3D7)__XP_001351122.1__LumSynt_L(GGS4-GGG)_Pf-CSP(19-397) (opt4)
aggagagggcgcuuggcuugcaaggacccugagcugcggcauugaagcacacccaacccaacucgacugaagucagccucacugaaccggaucugagaaucuucucucucugggcuugccagggcucuccgaaccuagcuagcauccucuucaauuccaacuagaaagcuuaccaugcagaucuacgagggcaagcugaccgccgagggccugagauucggcaucguggccagcagauucaaccacgcccugguggacagacugguggagggcgccaucgacgccaucgugagacacggcggcagagaggaggacaucacccuggugagagugcccggcagcugggagauccccguggccgccggcgagcuggccagaaaggaggacaucgacgccgugaucgccaucggcgugcugaucagaggcgccaccccccacuucgacuacaucgccagcgaggugagcaagggccuggccgaccugagccuggagcugagaaagcccaucaccuucggcgugaucaccgccgacacccuggagcaggccaucgagagagccggcaccaagcacggcaacaagggcugggaggccgcccugagcgccaucgagauggccaaccuguucaagagccugagaggcggcagcggcggcagcggcggcagcggcggcagcggcggcggccuguuccaggaguaccagugcuacggcagcagcagcaacaccagagugcugaacgagcugaacuacgacaacgccggcaccaaccuguacaacgagcuggagaugaacuacuacggcaagcaggagaacugguacagccugaagaagaacagcagaagccugggcgagaacgacgacggcaacaacgaggacaacgagaagcugagaaagcccaagcacaagaagcugaagcagcccgccgacggcaaccccgaccccaacgccaaccccaacguggaccccaacgccaaccccaacguggaccccaacgccaaccccaacguggaccccaacgccaaccccaacgccaaccccaacgccaaccccaacgccaaccccaacgccaaccccaacgccaaccccaacgccaaccccaacgccaaccccaacgccaaccccaacgccaaccccaacgccaaccccaacgccaaccccaacgccaaccccaacgccaaccccaacgccaaccccaacgccaaccccaacgccaaccccaacguggaccccaacgccaaccccaacgccaaccccaacgccaaccccaacgccaaccccaacgccaaccccaacgccaaccccaacgccaaccccaacgccaaccccaacgccaaccccaacgccaaccccaacgccaaccccaacgccaaccccaacgccaaccccaacgccaaccccaacgccaaccccaacgccaaccccaacgccaaccccaacgccaaccccaacaagaacaaccagggcaacggccagggccacaacaugcccaacgaccccaacagaaacguggacgagaacgccaacgccaacagcgccgugaagaacaacaacaacgaggagcccagcgacaagcacaucaaggaguaccugaacaagauccagaacagccugagcaccgaguggagccccugcagcgugaccugcggcaacggcauccaggugagaaucaagcccggcagcgccaacaagcccaaggacgagcuggacuacgccaacgacaucgagaagaagaucugcaagauggagaagugcagcagcguguucaacguggugaacagcagcaucggccugaucauggugcugagcuuccuguuccugaacugaggacuagucccuguucccagagcccacuuuuuuuucuuuuuuugaaauaaaauagccugucuuucagaucucaaaggcucuuuucagagccaccaaaaaaaaaaaaaaaaaaaaaaaaaaaaaaaaaaaaaaaaaaaaaaaaaaaaaaaaaaaaaaaaagaauu

SEQ ID NO: 9319 - RNA, 1847 nt, Artificial Sequence
  mRNA Design a-3 (hSL-A64-N5) comprising derived and/or modified sequence from Pf(3D7)__XP_001351122.1__HsALB_Pf-CSP(19-272)_L(PVTN)_HBsAg (opt4)
aggagagggcgcuuggcuugcaaggacccugagcugcggcauugaagcacacccaacccaacucgacugaagucagccucacugaaccggaucugagaaucuucucucucugggcuugccagggcucuccgaaccuagcuagcauccucuucaauuccaacuagaaagcuuaccaugaagugggugaccuucaucagccugcuguuccuguucagcagcgccuacagccuguuccaggaguaccagugcuacggcagcagcagcaacaccagagugcugaacgagcugaacuacgacaacgccggcaccaaccuguacaacgagcuggagaugaacuacuacggcaagcaggagaacugguacagccugaagaagaacagcagaagccugggcgagaacgacgacggcaacaacgaggacaacgagaagcugagaaagcccaagcacaagaagcugaagcagcccgccgacggcaaccccgaccccaacgccaaccccaacguggaccccaacgccaaccccaacguggaccccaacgccaaccccaacguggaccccaacgccaaccccaacgccaaccccaacgccaaccccaacgccaaccccaacgccaaccccaacgccaaccccaacgccaaccccaacgccaaccccaacgccaaccccaacgccaaccccaacgccaaccccaacgccaaccccaacgccaaccccaacgccaaccccaacgccaaccccaacgccaaccccaacgccaaccccaacguggaccccaacgccaaccccaacgccaaccccaacgccaaccccaacgccaaccccaacgccaaccccaacgccaaccccaacgccaaccccaacgccaaccccaacgccaaccccaacgccaaccccaacgccaaccccaacgccaaccccaacgccaaccccaacgccaaccccaacgccaaccccaacgccaaccccaacgccaaccccaacgccaacccccccgugaccaacauggagaacaucaccagcggcuuccugggcccccugcuggugcugcaggccggcuucuuccugcugaccagaauccugaccaucccccagagccuggacagcugguggaccagccugaacuuccugggcggcagccccgugugccugggccagaacagccagagccccaccagcaaccacagccccaccagcugcccccccaucugccccggcuacagauggaugugccugagaagauucaucaucuuccuguucauccugcugcugugccugaucuuccugcuggugcugcuggacuaccagggcaugcugcccgugugcccccugauccccggcagcaccaccaccaacaccggccccugcaagaccugcaccacccccgcccagggcaacagcauguuccccagcugcugcugcaccaagcccaccgacggcaacugcaccugcauccccauccccagcagcugggccuucgccaaguaccugugggagugggccagcgugagauucagcuggcugagccugcuggugcccuucgugcagugguucgugggccugagccccaccguguggcugagcgccaucuggaugaugugguacuggggccccagccuguacagcaucgugagccccuucaucccccugcugcccaucuucuucugccuguggguguacaucugaggacuagucccuguucccagagcccacuuuuuuuucuuuuuuugaaauaaaauagccugucuuucagaucucaaaggcucuuuucagagccaccaaaaaaaaaaaaaaaaaaaaaaaaaaaaaaaaaaaaaaaaaaaaaaaaaaaaaaaaaaaaaaaaagaauu

SEQ ID NO: 9320 - RNA, 1964 nt, Artificial Sequence
  mRNA Design a-3 (hSL-A64-N5) comprising derived and/or modified sequence from Pf(3D7)__XP_001351122.1__HsALB_Pf-CSP(19-272)_L(AAY)_Pf-CSP(346-3 65)_L(AAY)_PADRE_L(PVTN)_HBsAg (opt4)
aggagagggcgcuuggcuugcaaggacccugagcugcggcauugaagcacacccaacccaacucgacugaagucagccucacugaaccggaucugagaaucuucucucucugggcuugccagggcucuccgaaccuagcuagcauccucuucaauuccaacuagaaagcuuaccaugaagugggugaccuucaucagccugcuguuccuguucagcagcgccuacagccuguuccaggaguaccagugcuacggcagcagcagcaacaccagagugcugaacgagcugaacuacgacaacgccggcaccaaccuguacaacgagcuggagaugaacuacuacggcaagcaggagaacugguacagccugaagaagaacagcagaagccugggcgagaacgacgacggcaacaacgaggacaacgagaagcugagaaagcccaagcacaagaagcugaagcagcccgccgacggcaaccccgaccccaacgccaaccccaacguggaccccaacgccaaccccaacguggaccccaacgccaaccccaacguggaccccaacgccaaccccaacgccaaccccaacgccaaccccaacgccaaccccaacgccaaccccaacgccaaccccaacgccaaccccaacgccaaccccaacgccaaccccaacgccaaccccaacgccaaccccaacgccaaccccaacgccaaccccaacgccaaccccaacgccaaccccaacgccaaccccaacgccaaccccaacguggaccccaacgccaaccccaacgccaaccccaacgccaaccccaacgccaaccccaacgccaaccccaacgccaaccccaacgccaaccccaacgccaaccccaacgccaaccccaacgccaaccccaacgccaaccccaacgccaaccccaacgccaaccccaacgccaaccccaacgccaaccccaacgccaaccccaacgccaaccccaacgccaaccccgccgccuacaucaagcccggcagcgccaacaagcccaaggacgagcuggacuacgccaacgacaucgaggccgccuacgccaaguucguggccgccuggacccugaaggccgccgcccccgugaccaacauggagaacaucaccagcggcuuccugggcccccugcuggugcugcaggccggcuucuuccugcugaccagaauccugaccaucccccagagccuggacagcugguggaccagccugaacuuccugggcggcagccccgugugccugggccagaacagccagagccccaccagcaaccacagccccaccagcugcccccccaucugccccggcuacagauggaugugccugagaagauucaucaucuuccuguucauccugcugcugugccugaucuuccugcuggugcugcuggacuaccagggcaugcugcccgugugcccccugauccccggcagcaccaccaccaacaccggccccugcaagaccugcaccacccccgcccagggcaacagcauguuccccagcugcugcugcaccaagcccaccgacggcaacugcaccugcauccccauccccagcagcugggccuucgccaaguaccugugggagugggccagcgugagauucagcuggcugagccugcuggugcccuucgugcagugguucgugggccugagccccaccguguggcugagcgccaucuggaugaugugguacuggggccccagccuguacagcaucgugagccccuucaucccccugcugcccaucuucuucugccuguggguguacaucugaggacuagucccuguucccagagcccacuuuuuuuucuuuuuuugaaauaaaauagccugucuuucagaucucaaaggcucuuuucagagccaccaaaaaaaaaaaaaaaaaaaaaaaaaaaaaaaaaaaaaaaaaaaaaaaaaaaaaaaaaaaaaaaaagaauu

SEQ ID NO: 9321 - RNA, 2183 nt, Artificial Sequence
  mRNA Design a-3 (hSL-A64-N5) comprising derived and/or modified sequence from Pf(3D7)__XP_001351122.1__HsALB_Pf-CSP(19-384)_L(PVTN)_HBsAg (opt4)
aggagagggcgcuuggcuugcaaggacccugagcugcggcauugaagcacacccaacccaacucgacugaagucagccucacugaaccggaucugagaaucuucucucucugggcuugccagggcucuccgaaccuagcuagcauccucuucaauuccaacuagaaagcuuaccaugaagugggugaccuucaucagccugcuguuccuguucagcagcgccuacagccuguuccaggaguaccagugcuacggcagcagcagcaacaccagagugcugaacgagcugaacuacgacaacgccggcaccaaccuguacaacgagcuggagaugaacuacuacggcaagcaggagaacugguacagccugaagaagaacagcagaagccugggcgagaacgacgacggcaacaacgaggacaacgagaagcugagaaagcccaagcacaagaagcugaagcagcccgccgacggcaaccccgaccccaacgccaaccccaacguggaccccaacgccaaccccaacguggaccccaacgccaaccccaacguggaccccaacgccaaccccaacgccaaccccaacgccaaccccaacgccaaccccaacgccaaccccaacgccaaccccaacgccaaccccaacgccaaccccaacgccaaccccaacgccaaccccaacgccaaccccaacgccaaccccaacgccaaccccaacgccaaccccaacgccaaccccaacgccaaccccaacgccaaccccaacguggaccccaacgccaaccccaacgccaaccccaacgccaaccccaacgccaaccccaacgccaaccccaacgccaaccccaacgccaaccccaacgccaaccccaacgccaaccccaacgccaaccccaacgccaaccccaacgccaaccccaacgccaaccccaacgccaaccccaacgccaaccccaacgccaaccccaacgccaaccccaacgccaaccccaacaagaacaaccagggcaacggccagggccacaacaugcccaacgaccccaacagaaacguggacgagaacgccaacgccaacagcgccgugaagaacaacaacaacgaggagcccagcgacaagcacaucaaggaguaccugaacaagauccagaacagccugagcaccgaguggagccccugcagcgugaccugcggcaacggcauccaggugagaaucaagcccggcagcgccaacaagcccaaggacgagcuggacuacgccaacgacaucgagaagaagaucugcaagauggagaagugcagcagcguguucaacguggugaacagcagccccgugaccaacauggagaacaucaccagcggcuuccugggcccccugcuggugcugcaggccggcuucuuccugcugaccagaauccugaccaucccccagagccuggacagcugguggaccagccugaacuuccugggcggcagccccgugugccugggccagaacagccagagccccaccagcaaccacagccccaccagcugcccccccaucugccccggcuacagauggaugugccugagaagauucaucaucuuccuguucauccugcugcugugccugaucuuccugcuggugcugcuggacuaccagggcaugcugcccgugugcccccugauccccggcagcaccaccaccaacaccggccccugcaagaccugcaccacccccgcccagggcaacagcauguuccccagcugcugcugcaccaagcccaccgacggcaacugcaccugcauccccauccccagcagcugggccuucgccaaguaccugugggagugggccagcgugagauucagcuggcugagccugcuggugcccuucgugcagugguucgugggccugagccccaccguguggcugagcgccaucuggaugaugugguacuggggccccagccuguacagcaucgugagccccuucaucccccugcugcccaucuucuucugccuguggguguacaucugaggacuagucccuguucccagagcccacuuuuuuuucuuuuuuugaaauaaaauagccugucuuucagaucucaaaggcucuuuucagagccaccaaaaaaaaaaaaaaaaaaaaaaaaaaaaaaaaaaaaaaaaaaaaaaaaaaaaaaaaaaaaaaaaagaauu

SEQ ID NO: 9322 - RNA, 2000 nt, Artificial Sequence
  mRNA Design a-3 (hSL-A64-N5) comprising derived and/or modified sequence from Pf(3D7)__XP_001351122.1__HsALB_Pf-CSP(19-384)_L(SGG)_Ferritin (opt4)
aggagagggcgcuuggcuugcaaggacccugagcugcggcauugaagcacacccaacccaacucgacugaagucagccucacugaaccggaucugagaaucuucucucucugggcuugccagggcucuccgaaccuagcuagcauccucuucaauuccaacuagaaagcuuaccaugaagugggugaccuucaucagccugcuguuccuguucagcagcgccuacagccuguuccaggaguaccagugcuacggcagcagcagcaacaccagagugcugaacgagcugaacuacgacaacgccggcaccaaccuguacaacgagcuggagaugaacuacuacggcaagcaggagaacugguacagccugaagaagaacagcagaagccugggcgagaacgacgacggcaacaacgaggacaacgagaagcugagaaagcccaagcacaagaagcugaagcagcccgccgacggcaaccccgaccccaacgccaaccccaacguggaccccaacgccaaccccaacguggaccccaacgccaaccccaacguggaccccaacgccaaccccaacgccaaccccaacgccaaccccaacgccaaccccaacgccaaccccaacgccaaccccaacgccaaccccaacgccaaccccaacgccaaccccaacgccaaccccaacgccaaccccaacgccaaccccaacgccaaccccaacgccaaccccaacgccaaccccaacgccaaccccaacgccaaccccaacguggaccccaacgccaaccccaacgccaaccccaacgccaaccccaacgccaaccccaacgccaaccccaacgccaaccccaacgccaaccccaacgccaaccccaacgccaaccccaacgccaaccccaacgccaaccccaacgccaaccccaacgccaaccccaacgccaaccccaacgccaaccccaacgccaaccccaacgccaaccccaacgccaaccccaacaagaacaaccagggcaacggccagggccacaacaugcccaacgaccccaacagaaacguggacgagaacgccaacgccaacagcgccgugaagaacaacaacaacgaggagcccagcgacaagcacaucaaggaguaccugaacaagauccagaacagccugagcaccgaguggagccccugcagcgugaccugcggcaacggcauccaggugagaaucaagcccggcagcgccaacaagcccaaggacgagcuggacuacgccaacgacaucgagaagaagaucugcaagauggagaagugcagcagcguguucaacguggugaacagcagcagcggcggccugagcaaggacaucaucaagcugcugaacgagcaggugaacaaggagaugaacagcagcaaccuguacaugagcaugagcagcuggugcuacacccacagccuggacggcgccggccuguuccuguucgaccacgccgccgaggaguacgagcacgccaagaagcugaucaucuuccugaacgagaacaacgugcccgugcagcugaccagcaucagcgcccccgagcacaaguucgagggccugacccagaucuuccagaaggccuacgagcacgagcagcacaucagcgagagcaucaacaacaucguggaccacgccaucaagagcaaggaccacgccaccuucaacuuccugcagugguacguggccgagcagcacgaggaggaggugcuguucaaggacauccuggacaagaucgagcugaucggcaacgagaaccacggccuguaccuggccgaccaguacgugaagggcaucgccaagagcagaaagagcugaggacuagucccuguucccagagcccacuuuuuuuucuuuuuuugaaauaaaauagccugucuuucagaucucaaaggcucuuuucagagccaccaaaaaaaaaaaaaaaaaaaaaaaaaaaaaaaaaaaaaaaaaaaaaaaaaaaaaaaaaaaaaaaaagaauu

SEQ ID NO: 9323 - RNA, 1961 nt, Artificial Sequence
  mRNA Design a-3 (hSL-A64-N5) comprising derived and/or modified sequence from Pf(3D7)__XP_001351122.1__HsALB_Pf-CSP(93-384)_L(PVTN)_HBsAg (opt4)
aggagagggcgcuuggcuugcaaggacccugagcugcggcauugaagcacacccaacccaacucgacugaagucagccucacugaaccggaucugagaaucuucucucucugggcuugccagggcucuccgaaccuagcuagcauccucuucaauuccaacuagaaagcuuaccaugaagugggugaccuucaucagccugcuguuccuguucagcagcgccuacagcaagcugaagcagcccgccgacggcaaccccgaccccaacgccaaccccaacguggaccccaacgccaaccccaacguggaccccaacgccaaccccaacguggaccccaacgccaaccccaacgccaaccccaacgccaaccccaacgccaaccccaacgccaaccccaacgccaaccccaacgccaaccccaacgccaaccccaacgccaaccccaacgccaaccccaacgccaaccccaacgccaaccccaacgccaaccccaacgccaaccccaacgccaaccccaacgccaaccccaacgccaaccccaacguggaccccaacgccaaccccaacgccaaccccaacgccaaccccaacgccaaccccaacgccaaccccaacgccaaccccaacgccaaccccaacgccaaccccaacgccaaccccaacgccaaccccaacgccaaccccaacgccaaccccaacgccaaccccaacgccaaccccaacgccaaccccaacgccaaccccaacgccaaccccaacgccaaccccaacaagaacaaccagggcaacggccagggccacaacaugcccaacgaccccaacagaaacguggacgagaacgccaacgccaacagcgccgugaagaacaacaacaacgaggagcccagcgacaagcacaucaaggaguaccugaacaagauccagaacagccugagcaccgaguggagccccugcagcgugaccugcggcaacggcauccaggugagaaucaagcccggcagcgccaacaagcccaaggacgagcuggacuacgccaacgacaucgagaagaagaucugcaagauggagaagugcagcagcguguucaacguggugaacagcagccccgugaccaacauggagaacaucaccagcggcuuccugggcccccugcuggugcugcaggccggcuucuuccugcugaccagaauccugaccaucccccagagccuggacagcugguggaccagccugaacuuccugggcggcagccccgugugccugggccagaacagccagagccccaccagcaaccacagccccaccagcugcccccccaucugccccggcuacagauggaugugccugagaagauucaucaucuuccuguucauccugcugcugugccugaucuuccugcuggugcugcuggacuaccagggcaugcugcccgugugcccccugauccccggcagcaccaccaccaacaccggccccugcaagaccugcaccacccccgcccagggcaacagcauguuccccagcugcugcugcaccaagcccaccgacggcaacugcaccugcauccccauccccagcagcugggccuucgccaaguaccugugggagugggccagcgugagauucagcuggcugagccugcuggugcccuucgugcagugguucgugggccugagccccaccguguggcugagcgccaucuggaugaugugguacuggggccccagccuguacagcaucgugagccccuucaucccccugcugcccaucuucuucugccuguggguguacaucugaggacuagucccuguucccagagcccacuuuuuuuucuuuuuuugaaauaaaauagccugucuuucagaucucaaaggcucuuuucagagccaccaaaaaaaaaaaaaaaaaaaaaaaaaaaaaaaaaaaaaaaaaaaaaaaaaaaaaaaaaaaaaaaaagaauu

SEQ ID NO: 9324 - RNA, 1622 nt, Artificial Sequence; identical to SEQ ID NO: 6950
  mRNA Design a-3 (hSL-A64-N5) comprising derived and/or modified sequence from Pf(3D7)__XP_001351122.1__HsALB_Pf-CSP(199-377)_L(PVTN)_HBsAg (opt4)

SEQ ID NO: 9325 - RNA, 1319 nt, Artificial Sequence
  mRNA Design a-3 (hSL-A64-N5) comprising derived and/or modified sequence from Pf(3D7)__XP_001351122.1__HsALB_Pf-CSP(19-272)_L(AAY)_Pf-CSP(346-3 75)_L(AAY)_Pf-CSP(310-327) (opt4)
aggagagggcgcuuggcuugcaaggacccugagcugcggcauugaagcacacccaacccaacucgacugaagucagccucacugaaccggaucugagaaucuucucucucugggcuugccagggcucuccgaaccuagcuagcauccucuucaauuccaacuagaaagcuuaccaugaagugggugaccuucaucagccugcuguuccuguucagcagcgccuacagccuguuccaggaguaccagugcuacggcagcagcagcaacaccagagugcugaacgagcugaacuacgacaacgccggcaccaaccuguacaacgagcuggagaugaacuacuacggcaagcaggagaacugguacagccugaagaagaacagcagaagccugggcgagaacgacgacggcaacaacgaggacaacgagaagcugagaaagcccaagcacaagaagcugaagcagcccgccgacggcaaccccgaccccaacgccaaccccaacguggaccccaacgccaaccccaacguggaccccaacgccaaccccaacguggaccccaacgccaaccccaacgccaaccccaacgccaaccccaacgccaaccccaacgccaaccccaacgccaaccccaacgccaaccccaacgccaaccccaacgccaaccccaacgccaaccccaacgccaaccccaacgccaaccccaacgccaaccccaacgccaaccccaacgccaaccccaacgccaaccccaacgccaaccccaacguggaccccaacgccaaccccaacgccaaccccaacgccaaccccaacgccaaccccaacgccaaccccaacgccaaccccaacgccaaccccaacgccaaccccaacgccaaccccaacgccaaccccaacgccaaccccaacgccaaccccaacgccaaccccaacgccaaccccaacgccaaccccaacgccaaccccaacgccaaccccaacgccaaccccgccgccuacaucaagcccggcagcgccaacaagcccaaggacgagcuggacuacgccaacgacaucgagaagaagaucugcaagauggagaagugcagcgccgccuacgagcccagcgacaagcacaucaaggaguaccugaacaagauccagaacagccugugaggacuagucccuguucccagagcccacuuuuuuuucuuuuuuugaaauaaaauagccugucuuucagaucucaaaggcucuuuucagagccaccaaaaaaaaaaaaaaaaaaaaaaaaaaaaaaaaaaaaaaaaaaaaaaaaaaaaaaaaaaaaaaaaagaauu

SEQ ID NO: 9326 - RNA, 1367 nt, Artificial Sequence
  mRNA Design a-3 (hSL-A64-N5) comprising derived and/or modified sequence from Pf(3D7)__XP_001351122.1__HsALB_Pf-CSP(19-272)_L(AAY)_Pf-CSP(346-3 75)_L(AAY)_Pf-CSP(310-327)_L(AAY)_PADRE (opt4)
aggagagggcgcuuggcuugcaaggacccugagcugcggcauugaagcacacccaacccaacucgacugaagucagccucacugaaccggaucugagaaucuucucucucugggcuugccagggcucuccgaaccuagcuagcauccucuucaauuccaacuagaaagcuuaccaugaagugggugaccuucaucagccugcuguuccuguucagcagcgccuacagccuguuccaggaguaccagugcuacggcagcagcagcaacaccagagugcugaacgagcugaacuacgacaacgccggcaccaaccuguacaacgagcuggagaugaacuacuacggcaagcaggagaacugguacagccugaagaagaacagcagaagccugggcgagaacgacgacggcaacaacgaggacaacgagaagcugagaaagcccaagcacaagaagcugaagcagcccgccgacggcaaccccgaccccaacgccaaccccaacguggaccccaacgccaaccccaacguggaccccaacgccaaccccaacguggaccccaacgccaaccccaacgccaaccccaacgccaaccccaacgccaaccccaacgccaaccccaacgccaaccccaacgccaaccccaacgccaaccccaacgccaaccccaacgccaaccccaacgccaaccccaacgccaaccccaacgccaaccccaacgccaaccccaacgccaaccccaacgccaaccccaacgccaaccccaacguggaccccaacgccaaccccaacgccaaccccaacgccaaccccaacgccaaccccaacgccaaccccaacgccaaccccaacgccaaccccaacgccaaccccaacgccaaccccaacgccaaccccaacgccaaccccaacgccaaccccaacgccaaccccaacgccaaccccaacgccaaccccaacgccaaccccaacgccaaccccaacgccaaccccgccgccuacaucaagcccggcagcgccaacaagcccaaggacgagcuggacuacgccaacgacaucgagaagaagaucugcaagauggagaagugcagcgccgccuacgagcccagcgacaagcacaucaaggaguaccugaacaagauccagaacagccuggccgccuacgccaaguucguggccgccuggacccugaaggccgccgccugaggacuagucccuguucccagagcccacuuuuuuuucuuuuuuugaaauaaaauagccugucuuucagaucucaaaggcucuuuucagagccaccaaaaaaaaaaaaaaaaaaaaaaaaaaaaaaaaaaaaaaaaaaaaaaaaaaaaaaaaaaaaaaaaagaauu

SEQ ID NO: 9327 - RNA, 1367 nt, Artificial Sequence
  mRNA Design a-3 (hSL-A64-N5) comprising derived and/or modified sequence from Pf(3D7)__XP_001351122.1__HsALB_Pf-CSP(19-272)_L(AAY)_Pf-CSP(310-3 27)_L(AAY)_Pf-CSP(346-375)_L(AAY)_PADRE (opt4)
aggagagggcgcuuggcuugcaaggacccugagcugcggcauugaagcacacccaacccaacucgacugaagucagccucacugaaccggaucugagaaucuucucucucugggcuugccagggcucuccgaaccuagcuagcauccucuucaauuccaacuagaaagcuuaccaugaagugggugaccuucaucagccugcuguuccuguucagcagcgccuacagccuguuccaggaguaccagugcuacggcagcagcagcaacaccagagugcugaacgagcugaacuacgacaacgccggcaccaaccuguacaacgagcuggagaugaacuacuacggcaagcaggagaacugguacagccugaagaagaacagcagaagccugggcgagaacgacgacggcaacaacgaggacaacgagaagcugagaaagcccaagcacaagaagcugaagcagcccgccgacggcaaccccgaccccaacgccaaccccaacguggaccccaacgccaaccccaacguggaccccaacgccaaccccaacguggaccccaacgccaaccccaacgccaaccccaacgccaaccccaacgccaaccccaacgccaaccccaacgccaaccccaacgccaaccccaacgccaaccccaacgccaaccccaacgccaaccccaacgccaaccccaacgccaaccccaacgccaaccccaacgccaaccccaacgccaaccccaacgccaaccccaacgccaaccccaacguggaccccaacgccaaccccaacgccaaccccaacgccaaccccaacgccaaccccaacgccaaccccaacgccaaccccaacgccaaccccaacgccaaccccaacgccaaccccaacgccaaccccaacgccaaccccaacgccaaccccaacgccaaccccaacgccaaccccaacgccaaccccaacgccaaccccaacgccaaccccaacgccaaccccgccgccuacgagcccagcgacaagcacaucaaggaguaccugaacaagauccagaacagccuggccgccuacaucaagcccggcagcgccaacaagcccaaggacgagcuggacuacgccaacgacaucgagaagaagaucugcaagauggagaagugcagcgccgccuacgccaaguucguggccgccuggacccugaaggccgccgccugaggacuagucccuguucccagagcccacuuuuuuuucuuuuuuugaaauaaaauagccugucuuucagaucucaaaggcucuuuucagagccaccaaaaaaaaaaaaaaaaaaaaaaaaaaaaaaaaaaaaaaaaaaaaaaaaaaaaaaaaaaaaaaaaagaauu

SEQ ID NO: 9328 - RNA, 1421 nt, Artificial Sequence
  mRNA Design a-3 (hSL-A64-N5) comprising derived and/or modified sequence from Pf(3D7)__XP_001351122.1__HsALB_Pf-CSP(19-272)_L(AAY)_Pf-CSP(310-3 27)_L(AAY)_Pf-CSP(346-375)_L(AAY)_PADRE_L(AAY)_P2 (opt4)
aggagagggcgcuuggcuugcaaggacccugagcugcggcauugaagcacacccaacccaacucgacugaagucagccucacugaaccggaucugagaaucuucucucucugggcuugccagggcucuccgaaccuagcuagcauccucuucaauuccaacuagaaagcuuaccaugaagugggugaccuucaucagccugcuguuccuguucagcagcgccuacagccuguuccaggaguaccagugcuacggcagcagcagcaacaccagagugcugaacgagcugaacuacgacaacgccggcaccaaccuguacaacgagcuggagaugaacuacuacggcaagcaggagaacugguacagccugaagaagaacagcagaagccugggcgagaacgacgacggcaacaacgaggacaacgagaagcugagaaagcccaagcacaagaagcugaagcagcccgccgacggcaaccccgaccccaacgccaaccccaacguggaccccaacgccaaccccaacguggaccccaacgccaaccccaacguggaccccaacgccaaccccaacgccaaccccaacgccaaccccaacgccaaccccaacgccaaccccaacgccaaccccaacgccaaccccaacgccaaccccaacgccaaccccaacgccaaccccaacgccaaccccaacgccaaccccaacgccaaccccaacgccaaccccaacgccaaccccaacgccaaccccaacgccaaccccaacguggaccccaacgccaaccccaacgccaaccccaacgccaaccccaacgccaaccccaacgccaaccccaacgccaaccccaacgccaaccccaacgccaaccccaacgccaaccccaacgccaaccccaacgccaaccccaacgccaaccccaacgccaaccccaacgccaaccccaacgccaaccccaacgccaaccccaacgccaaccccaacgccaaccccgccgccuacgagcccagcgacaagcacaucaaggaguaccugaacaagauccagaacagccuggccgccuacaucaagcccggcagcgccaacaagcccaaggacgagcuggacuacgccaacgacaucgagaagaagaucugcaagauggagaagugcagcgccgccuacgccaaguucguggccgccuggacccugaaggccgccgccgccgccuaccaguacaucaaggccaacagcaaguucaucggcaucaccgagcugugaggacuagucccuguucccagagcccacuuuuuuuucuuuuuuugaaauaaaauagccugucuuucagaucucaaaggcucuuuucagagccaccaaaaaaaaaaaaaaaaaaaaaaaaaaaaaaaaaaaaaaaaaaaaaaaaaaaaaaaaaaaaaaaaagaauu

SEQ ID NO: 9329 - RNA, 1385 nt, Artificial Sequence
  mRNA Design a-3 (hSL-A64-N5) comprising derived and/or modified sequence from Pf(3D7)__XP_001351122.1__HsALB_Pf-CSP(19-272)_L(AAY)_Pf-CSP(310-3 27)_Linker (AAY)_Pf-CSP(346-397) (opt4)
aggagagggcgcuuggcuugcaaggacccugagcugcggcauugaagcacacccaacccaacucgacugaagucagccucacugaaccggaucugagaaucuucucucucugggcuugccagggcucuccgaaccuagcuagcauccucuucaauuccaacuagaaagcuuaccaugaagugggugaccuucaucagccugcuguuccuguucagcagcgccuacagccuguuccaggaguaccagugcuacggcagcagcagcaacaccagagugcugaacgagcugaacuacgacaacgccggcaccaaccuguacaacgagcuggagaugaacuacuacggcaagcaggagaacugguacagccugaagaagaacagcagaagccugggcgagaacgacgacggcaacaacgaggacaacgagaagcugagaaagcccaagcacaagaagcugaagcagcccgccgacggcaaccccgaccccaacgccaaccccaacguggaccccaacgccaaccccaacguggaccccaacgccaaccccaacguggaccccaacgccaaccccaacgccaaccccaacgccaaccccaacgccaaccccaacgccaaccccaacgccaaccccaacgccaaccccaacgccaaccccaacgccaaccccaacgccaaccccaacgccaaccccaacgccaaccccaacgccaaccccaacgccaaccccaacgccaaccccaacgccaaccccaacgccaaccccaacguggaccccaacgccaaccccaacgccaaccccaacgccaaccccaacgccaaccccaacgccaaccccaacgccaaccccaacgccaaccccaacgccaaccccaacgccaaccccaacgccaaccccaacgccaaccccaacgccaaccccaacgccaaccccaacgccaaccccaacgccaaccccaacgccaaccccaacgccaaccccaacgccaaccccgccgccuacgagcccagcgacaagcacaucaaggaguaccugaacaagauccagaacagccuggccgccuacaucaagcccggcagcgccaacaagcccaaggacgagcuggacuacgccaacgacaucgagaagaagaucugcaagauggagaagugcagcagcguguucaacguggugaacagcagcaucggccugaucauggugcugagcuuccuguuccugaacugaggacuagucccuguucccagagcccacuuuuuuuucuuuuuuugaaauaaaauagccugucuuucagaucucaaaggcucuuuucagagccaccaaaaaaaaaaaaaaaaaaaaaaaaaaaaaaaaaaaaaaaaaaaaaaaaaaaaaaaaaaaaaaaaagaauu

SEQ ID NO: 9330 - RNA, 1985 nt, Artificial Sequence
  mRNA Design a-3 (hSL-A64-N5) comprising derived and/or modified sequence from Pf(3D7)__XP_001351122.1__LumSynt_L(GGS4-GGG)_Pf-CSP(19-397) (opt5)
aggagagggcgcuuggcuugcaaggacccugagcugcggcauugaagcacacccaacccaacucgacugaagucagccucacugaaccggaucugagaaucuucucucucugggcuugccagggcucuccgaaccuagcuagcauccucuucaauuccaacuagaaagcuuaccaugcagaucuacgagggcaagcugaccgccgaagggcucagauucggaauuguggcuagccgguuuaaccacgcccuggucgaccgccuuguugagggcgcgaucgaugcuauugugagacaugggggacgggaagaggacaucacacuggugcgcguccccggcuccugggaaauuccuguggccgccggggagcucgcuagaaaagaggauaucgacgccguuaucgcuauuggagugcugauccggggcgccacgccgcacuucgauuauauugcgucugaagucagcaagggccuugccgaccugucccucgagcugcgcaaacccaucaccuuuggggugauuacagcugauacccuggaacaagccaucgagagagcuggaacaaagcauggcaauaaagggugggaggccgcgcucucugccauugaaauggcuaaccuguucaagagccuucggggaggcuccgggggaucuggcggcagcgggggauccggcgggggacuguuucaggaguaccagugcuauggcuccucuuccaauacccgcguucucaacgaacugaauuacgacaacgccgggacaaaucuuuauaacgagcuggaaaugaauuacuauggaaagcaggagaacugguacagccucaaaaagaacucuagaucccugggcgagaaugaugacggcaauaacgaagauaaugagaaacugcggaagccuaaacacaagaagcucaaacaacccgcugacgggaacccugaucccaacgccaauccuaacguggacccgaaugccaaccccaaugucgacccuaacgcuaaucccaacguggauccuaaugcgaaccccaaugccaacccgaaugcuaacccuaaugccaaccccaacgccaauccuaacgcuaaucccaacgccaaucccaacgcgaauccuaacgcuaauccgaacgccaaucccaacgccaauccuaacgcuaaucccaacgccaacccuaaugcuaaccccaaugccaacccgaaugcgaacccuaaugccaaccccaauguggacccuaacgcuaaucccaacgccaauccuaacgcuaaucccaacgccaacccgaaugcgaacccuaaugccaaccccaaugcuaaccccaaugccaacccuaaugcuaacccgaaugccaaccccaaugccaacccuaaugcuaaccccaaugcgaacccuaacgccaaucccaacgcuaauccuaacgccaaucccaacgccaauccgaacgcuaauccuaacaagaauaaccagggaaauggccaggggcauaacaugcccaaugauccuaaccgcaacgucgacgaaaaugccaacgcgaauagcgcuguuaaaaacaauaacaaugaggaacccucugauaagcacaucaaagaguaccugaacaagauccagaauagccuuagcaccgagugguccccguguucugugacgugcggaaacggcauucaagugagaaucaaaccugggagcgccaauaagcccaaggacgaacuggauuaugccaacgacauugagaaaaagaucuguaaaauggaaaagugcuccagcgucuucaaugugguuaacucuuccauuggccucaucauggugcugagcuuucuuuuccugaauugaggacuagucccuguucccagagcccacuuuuuuuucuuuuuuugaaauaaaauagccugucuuucagaucucaaaggcucuuuucagagccaccaaaaaaaaaaaaaaaaaaaaaaaaaaaaaaaaaaaaaaaaaaaaaaaaaaaaaaaaaaaaaaaaagaauu

SEQ ID NO: 9331 - RNA, 1847 nt, Artificial Sequence
  mRNA Design a-3 (hSL-A64-N5) comprising derived and/or modified sequence from Pf(3D7)__XP_001351122.1__HsALB_Pf-CSP(19-272)_L(PVTN)_HBsAg (opt5)
aggagagggcgcuuggcuugcaaggacccugagcugcggcauugaagcacacccaacccaacucgacugaagucagccucacugaaccggaucugagaaucuucucucucugggcuugccagggcucuccgaaccuagcuagcauccucuucaauuccaacuagaaagcuuaccaugaagugggugaccuucaucagccugcucuuucuguucuccucugccuacagccuuuuucaggaguaucaaugcuacggcuccucuagcaacacaagaguccugaaugaacucaacuaugacaaugcugggacgaaccuguacaaugagcuugaaaugaacuauuacggaaaacaggagaauugguauucccugaagaaaaacucucggagccucggcgaaaaugaugacgggaacaaugaggauaacgagaagcugcgcaaacccaagcacaagaaacugaagcagccugccgacggaaauccggaucccaacgcgaauccuaacguugaccccaacgcuaauccuaacguggaucccaaugccaacccuaauguggacccgaacgccaaucccaacgcuaauccuaacgccaaucccaacgcuaauccuaacgccaaucccaacgcgaacccgaaugccaacccuaaugcuaaccccaaugccaacccuaaugcuaaccccaaugccaaccccaaugcgaacccuaaugccaacccgaaugcuaaccccaacgccaauccuaacgcuaaucccaacgccaauccuaacgucgaucccaaugccaacccgaaugcuaacccuaaugcgaaccccaaugccaacccuaaugcuaaccccaacgccaauccuaacgccaaucccaacgcuaauccgaacgccaauccuaacgcgaaucccaacgcuaaucccaacgccaauccuaacgccaauccgaacgcuaaucccaacgccaacccuaaugcuaaccccaaugccaacccuaaugcgaaucccccugugaccaacauggaaaacauuacauccggcuuccucgggccccugcuuguucugcaggccggauuuuuccuccugaccagaauccuuacaauuccgcaaagccuggacucuugguggaccucccucaauuuucugggcggcagcccugugugucuggggcagaacucucagucccccacaagcaaucauucuccuaccuccugucccccgaucugcccuggauaccgguggaugugccuccgcagauucauuaucuuucuguucauccuucugcucugucugauuuuucuucugguccuccuggauuaccagggcaugcugcccgugugcccucucauccccgggagcacgaccacaaacaccggacccuguaaaacaugcaccacgccugcucaaggcaauuccauguucccgucuuguugcuguacaaagcccaccgacgggaacugcacaugcauuccuauccccagcuccugggccuuugcuaaauaucugugggagugggccagcguucgguucucuuggcuuucccugcucgugccuuucguccagugguuugugggacugagccccaccguguggcuuucugcgauuuggaugaugugguacuggggcccuagccuguauuccaucgucucuccguucauuccccuccugccuaucuuuuucugucuguggguuuacaucugaggacuagucccuguucccagagcccacuuuuuuuucuuuuuuugaaauaaaauagccugucuuucagaucucaaaggcucuuuucagagccaccaaaaaaaaaaaaaaaaaaaaaaaaaaaaaaaaaaaaaaaaaaaaaaaaaaaaaaaaaaaaaaaaagaauu

SEQ ID NO: 9332 - RNA, 1964 nt, Artificial Sequence
  mRNA Design a-3 (hSL-A64-N5) comprising derived and/or modified sequence from Pf(3D7)__XP_001351122.1__HsALB_Pf-CSP(19-272)_L(AAY)_Pf-CSP(346-3 65)_L(AAY)_PADRE_L(PVTN)_HBsAg (opt5)
aggagagggcgcuuggcuugcaaggacccugagcugcggcauugaagcacacccaacccaacucgacugaagucagccucacugaaccggaucugagaaucuucucucucugggcuugccagggcucuccgaaccuagcuagcauccucuucaauuccaacuagaaagcuuaccaugaagugggugaccuucaucagccugcucuuucuguucuccucugccuacagccuuuuucaggaguaucaaugcuacggcuccucuagcaacacaagaguccugaaugaacucaacuaugacaaugcugggacgaaccuguacaaugagcuugaaaugaacuauuacggaaaacaggagaauugguauucccugaagaaaaacucucggagccucggcgaaaaugaugacgggaacaaugaggauaacgagaagcugcgcaaacccaagcacaagaaacugaagcagccugccgacggaaauccggaucccaacgcgaauccuaacguugaccccaacgcuaauccuaacguggaucccaaugccaacccuaauguggacccgaacgccaaucccaacgcuaauccuaacgccaaucccaacgcuaauccuaacgccaaucccaacgcgaacccgaaugccaacccuaaugcuaaccccaaugccaacccuaaugcuaaccccaaugccaaccccaaugcgaacccuaaugccaacccgaaugcuaaccccaacgccaauccuaacgcuaaucccaacgccaauccuaacgucgaucccaaugccaacccgaaugcuaacccuaaugcgaaccccaaugccaacccuaaugcuaaccccaacgccaauccuaacgccaaucccaacgcuaauccgaacgccaauccuaacgcgaaucccaacgcuaaucccaacgccaauccuaacgccaauccgaacgcuaaucccaacgccaacccuaaugcuaaccccaaugccaacccuaaugcgaaccccgccgcuuacauuaaaccuggcuccgccaauaagcccaaagacgaacucgauuacgcuaacgacaucgaggccgcguaugccaaguucguggcugccuggacccugaaggcugccgccccgguuacaaauauggaaaacauuaccagcggguuucuuggaccucugcucgugcugcaggcuggcuucuuucuucugacaagaauccucaccauuccccaaucucuggauuccugguggacaagccugaauuuccucggcgggucuccugucugucugggacagaacucccagagccccaccucuaaucauuccccgacgagcugcccucccaucuguccuggcuaccgguggaugugccuucgcagauuuaucauuuuccuguuuauccuccugcuuugucugauuuuccuccuggugcugcucgacuaucaggggaugcugcccguuugcccccuuaucccuggauccaccacaaccaacacaggcccguguaaaaccugcacgacacccgcgcaaggaaauucuauguuuccuagcuguugcuguaccaagcccacagacgggaacuguaccugcauuccuauccccuccagcugggccuucgcuaaauaccugugggagugggccucugugcgguucuccuggcucagccugcuugucccuuuugugcagugguucgugggccugucuccgaccgucuggcucagcgccauuuggaugaugugguauuggggccccucccuguacucuaucguuagcccuuuuaucccccugcucccuauuuucuuuugccuguggguguauaucugaggacuagucccuguucccagagcccacuuuuuuuucuuuuuuugaaauaaaauagccugucuuucagaucucaaaggcucuuuucagagccaccaaaaaaaaaaaaaaaaaaaaaaaaaaaaaaaaaaaaaaaaaaaaaaaaaaaaaaaaaaaaaaaaagaauu

SEQ ID NO: 9333 - RNA, 2183 nt, Artificial Sequence
  mRNA Design a-3 (hSL-A64-N5) comprising derived and/or modified sequence from Pf(3D7)__XP_001351122.1__HsALB_Pf-CSP(19-384)_L(PVTN)_HBsAg (opt5)
aggagagggcgcuuggcuugcaaggacccugagcugcggcauugaagcacacccaacccaacucgacugaagucagccucacugaaccggaucugagaaucuucucucucugggcuugccagggcucuccgaaccuagcuagcauccucuucaauuccaacuagaaagcuuaccaugaagugggugaccuucaucagccugcucuuucuguucuccucugccuacagccuuuuucaggaguaucaaugcuacggcuccucuagcaacacaagaguccugaaugaacucaacuaugacaaugcugggacgaaccuguacaaugagcuugaaaugaacuauuacggaaaacaggagaauugguauucccugaagaaaaacucucggagccucggcgaaaaugaugacgggaacaaugaggauaacgagaagcugcgcaaacccaagcacaagaaacugaagcagccugccgacggaaauccggaucccaacgcgaauccuaacguugaccccaacgcuaauccuaacguggaucccaaugccaacccuaauguggacccgaacgccaaucccaacgcuaauccuaacgccaaucccaacgcuaauccuaacgccaaucccaacgcgaacccgaaugccaacccuaaugcuaaccccaaugccaacccuaaugcuaaccccaaugccaaccccaaugcgaacccuaaugccaacccgaaugcuaaccccaacgccaauccuaacgcuaaucccaacgccaauccuaacgucgaucccaaugccaacccgaaugcuaacccuaaugcgaaccccaaugccaacccuaaugcuaaccccaacgccaauccuaacgccaaucccaacgcuaauccgaacgccaauccuaacgcgaaucccaacgcuaaucccaacgccaauccuaacgccaauccgaacgcuaaucccaacgccaacccuaaugcuaaccccaaugccaacccuaaugcgaaccccaauaaaaacaaucagggcaacgggcaaggacauaauaugccuaacgaccccaauagaaacguggaugaaaaugccaacgcuaacuccgccguuaagaauaacaauaacgaggaaccgagcgacaaacacauuaaggaguaccucaauaagauccagaacucucuguccaccgaguggagcccuuguucugugacaugcggcaauggcauucagguccggaucaaacccggguccgcuaacaagccuaaagaugaacuugacuacgccaaugacauugagaagaaaaucuguaagauggaaaaaugcagcucuguguucaacguugucaauuccagccccgugaccaacauggagaauaucacauccggauuucugggcccgcuccuggugcuucaggcgggguucuuucugcucacccgcauucugacaaucccucaaucucuggauagcugguggaccucccucaacuuccugggaggcagccccgugugucuugggcaaaauucucaguccccuacgagcaaccauucucccaccagcugucccccuauuugcccgggauauagauggaugugccugcggcgcuuuaucauuuuccucuuuauccugcuucugugucucauuuuccugcugguccuccuggacuaccagggcaugcuucccguuugcccucugauccccggcuccacaaccacaaacaccgggccuuguaagacgugcacaacccccgcccagggaaauucuauguuuccuagcugcuguugcacaaagccgaccgauggcaacuguaccugcauccccauuccuuccagcugggcuuucgccaaauaucucugggaaugggcuucugugagauucuccuggcugagccuucuggugcccuuuguccagugguucguggggcucucuccuacaguuuggcuguccgccaucuggaugaugugguacuggggacccagccuguauuccauugugucuccguuuaucccucuccugcccauuuucuuuugucuuugggucuacaucugaggacuagucccuguucccagagcccacuuuuuuuucuuuuuuugaaauaaaauagccugucuuucagaucucaaaggcucuuuucagagccaccaaaaaaaaaaaaaaaaaaaaaaaaaaaaaaaaaaaaaaaaaaaaaaaaaaaaaaaaaaaaaaaaagaauu

SEQ ID NO: 9334 - RNA, 2000 nt, Artificial Sequence
  mRNA Design a-3 (hSL-A64-N5) comprising derived and/or modified sequence from Pf(3D7)__XP_001351122.1__HsALB_Pf-CSP(19-384)_L(SGG)_Ferritin (opt5)
aggagagggcgcuuggcuugcaaggacccugagcugcggcauugaagcacacccaacccaacucgacugaagucagccucacugaaccggaucugagaaucuucucucucugggcuugccagggcucuccgaaccuagcuagcauccucuucaauuccaacuagaaagcuuaccaugaagugggugaccuucaucagccugcucuuucuguucuccucugccuacagccuuuuucaggaguaucaaugcuacggcuccucuagcaacacaagagugcugaaugaacucaacuaugacaaugcugggacgaaccuguacaaugagcuugaaaugaacuauuacggaaaacaggagaauugguauucccugaagaaaaacucucggagccucggcgaaaaugaugacgggaacaaugaggauaacgagaagcugcgcaaacccaagcacaagaaacugaagcagccugccgacggaaauccggaucccaacgcgaauccuaacguugaccccaacgcuaauccuaacguggaucccaaugccaacccuaauguggacccgaacgccaaucccaacgcuaauccuaacgccaaucccaacgcuaauccuaacgccaaucccaacgcgaacccgaaugccaacccuaaugcuaaccccaaugccaacccuaaugcuaaccccaaugccaaccccaaugcgaacccuaaugccaacccgaaugcuaaccccaacgccaauccuaacgcuaaucccaacgccaauccuaacgucgaucccaaugccaacccgaaugcuaacccuaaugcgaaccccaaugccaacccuaaugcuaaccccaacgccaauccuaacgccaaucccaacgcuaauccgaacgccaauccuaacgcgaaucccaacgcuaaucccaacgccaauccuaacgccaauccgaacgcuaaucccaacgccaacccuaaugcuaaccccaaugccaacccuaaugcgaaccccaauaaaaacaaucagggcaacgggcaaggacauaauaugccuaacgaccccaauagaaacguggaugaaaaugccaacgcuaacuccgccguuaagaauaacaauaacgaggaaccgagcgacaaacacauuaaggaguaccucaauaagauccagaacucucuguccaccgaguggagcccuuguucugugacaugcggcaauggcauucagguccggaucaaacccggguccgcuaacaagccuaaagaugaacuugacuacgccaaugacauugagaagaaaaucuguaagauggaaaaaugcagcucuguguucaacguugugaacuccagcuccggaggccugucuaaggauaucauuaagcuccugaaugagcaggucaauaaagaaaugaacagcuccaaucuuuauaugagcaugucuuccugguguuacacccauagccuggacggggcgggacucuuucuguucgaucacgccgcugaggaguaugaacaugccaagaaacugaucauuuuucucaacgagaacaaugugcccgugcaacugacaucuaucagcgcuccggaacacaaguucgagggccuuacccagauuuuucagaaagccuacgaacacgagcagcauaucuccgagucuauuaacaauaucgucgaccacgccaucaagagcaaggaucaugcuacauucaacuuucugcaaugguauguugcggaacagcacgaggaagagguccucuucaaagacauucuggauaagaucgaacuuauugggaaugagaaccacggacuguaccucgccgaccaguaugugaaaggcaucgcuaagucccgcaaaagcugaggacuagucccuguucccagagcccacuuuuuuuucuuuuuuugaaauaaaauagccugucuuucagaucucaaaggcucuuuucagagccaccaaaaaaaaaaaaaaaaaaaaaaaaaaaaaaaaaaaaaaaaaaaaaaaaaaaaaaaaaaaaaaaaagaauu

SEQ ID NO: 9335 - RNA, 1961 nt, Artificial Sequence
  mRNA Design a-3 (hSL-A64-N5) comprising derived and/or modified sequence from Pf(3D7)__XP_001351122.1__HsALB_Pf-CSP(93-384)_L(PVTN)_HBsAg (opt5)
aggagagggcgcuuggcuugcaaggacccugagcugcggcauugaagcacacccaacccaacucgacugaagucagccucacugaaccggaucugagaaucuucucucucugggcuugccagggcucuccgaaccuagcuagcauccucuucaauuccaacuagaaagcuuaccaugaagugggugaccuucaucagccugcucuuucuguucuccucugccuacagcaaacuuaagcagcccgcugacggcaacccugauccgaaugccaaccccaaugucgacccuaacgcgaaucccaacguugauccuaaugcuaaccccaauguggacccuaacgccaauccgaacgccaaucccaacgcuaauccuaacgccaaccccaaugcuaacccuaaugccaaccccaaugcgaacccgaaugccaacccuaaugcuaaccccaaugccaacccuaaugcuaaccccaaugccaaccccaacgcgaauccuaacgccaauccgaacgcuaaucccaacgccaauccuaacgcuaaucccaacguggauccuaaugccaaccccaaugccaacccgaaugcuaacccuaacgcgaaucccaacgccaauccuaacgcuaaucccaacgccaauccuaacgccaaucccaacgcuaauccgaacgccaauccuaacgcgaaucccaacgcuaaccccaaugccaacccuaaugccaacccgaaugcuaaccccaaugccaacccuaaugcuaaccccaaugccaacccuaauaaaaacaaucaagggaacggacagggccacaauaugcccaacgacccuaacagaaaugucgaugagaacgcgaaugccaacuccgcugugaagaauaacaauaacgaggaacccucugacaaacauauuaaggaauaucugaauaagauccagaacagccucuccacagaguggucuccgugcagcguuacgugugggaaugggauucaggugcggaucaaaccuggcuccgccaacaagcccaaagaugaacuggacuacgcuaaugauauugagaagaaaaucugcaagauggagaaguguagcucugucuuuaacgugguuaauuccagcccugugaccaacauggaaaacaucacaucuggguuccuuggaccccugcucguccugcaagccggcuuuuuccugcucacccgcauucugacaaucccgcagucccuugacagcugguggaccucucugaauuuucucggcggguccccugugugccugggacagaacagccagucccccacaucuaaucacagcccuaccuccuguccucccauuugccccggcuauagauggaugugucuucggcgcuucaucauuuuucuguucauccuccugcugugccucauuuuucugcuugugcugcucgauuaccaagggaugcugccggucuguccccuuaucccuggaagcacgaccacaaacaccggccccugcaaaacauguaccacgccugcgcagggaaauucuauguuccccuccugcugcuguacaaagccuaccgacggaaacugcacauguaucccgauucccagcucuugggccuuugcuaaauaucugugggagugggccagcguuagauucuccuggcucucucugcuggugccuuucgugcagugguuugucggccucagccccaccguguggcuguccgcuaucuggaugaugugguacuggggcccuagccuuuauucuauuguuucccccuucaucccgcugcucccuaucuuuuucugccuguggguguacauuugaggacuagucccuguucccagagcccacuuuuuuuucuuuuuuugaaauaaaauagccugucuuucagaucucaaaggcucuuuucagagccaccaaaaaaaaaaaaaaaaaaaaaaaaaaaaaaaaaaaaaaaaaaaaaaaaaaaaaaaaaaaaaaaaagaauu

SEQ ID NO: 9336 - RNA, 1622 nt, Artificial Sequence; identical to SEQ ID NO: 6980
  mRNA Design a-3 (hSL-A64-N5) comprising derived and/or modified sequence from Pf(3D7)__XP_001351122.1__HsALB_Pf-CSP(199-377)_L(PVTN)_HBsAg (opt5)

SEQ ID NO: 9337 - RNA, 1319 nt, Artificial Sequence
  mRNA Design a-3 (hSL-A64-N5) comprising derived and/or modified sequence from Pf(3D7)__XP_001351122.1__HsALB_Pf-CSP(19-272)_L(AAY)_Pf-CSP(346-3 75)_L(AAY)_Pf-CSP(310-327) (opt5)
aggagagggcgcuuggcuugcaaggacccugagcugcggcauugaagcacacccaacccaacucgacugaagucagccucacugaaccggaucugagaaucuucucucucugggcuugccagggcucuccgaaccuagcuagcauccucuucaauuccaacuagaaagcuuaccaugaagugggugaccuucaucagccugcucuuucuguucuccucugccuacagccuuuuucaggaguaucaaugcuacggcuccucuagcaacacaagaguccugaaugaacucaacuaugacaaugcugggacgaaccuguacaaugagcuugaaaugaacuauuacggaaaacaggagaauugguauucccugaagaaaaacucucggagccucggcgaaaaugaugacgggaacaaugaggauaacgagaagcugcgcaaacccaagcacaagaaacugaagcagccugccgacggaaauccggaucccaacgcgaauccuaacguugaccccaacgcuaauccuaacguggaucccaaugccaacccuaauguggacccgaacgccaaucccaacgcuaauccuaacgccaaucccaacgcuaauccuaacgccaaucccaacgcgaacccgaaugccaacccuaaugcuaaccccaaugccaacccuaaugcuaaccccaaugccaaccccaaugcgaacccuaaugccaacccgaaugcuaaccccaacgccaauccuaacgcuaaucccaacgccaauccuaacgucgaucccaaugccaacccgaaugcuaacccuaaugcgaaccccaaugccaacccuaaugcuaaccccaacgccaauccuaacgccaaucccaacgcuaauccgaacgccaauccuaacgcgaaucccaacgcuaaucccaacgccaauccuaacgccaauccgaacgcuaaucccaacgccaacccuaaugcuaaccccaaugccaacccuaaugcgaaccccgccgcuuacauuaaaccuggcuccgccaauaagcccaaagacgaacucgauuacgcuaacgacaucgagaagaagauuuguaaaauggaaaagugcagcgccgcguaugagccgucugauaaacauaucaaggaguaccugaauaaaauucagaacucccuuugaggacuagucccuguucccagagcccacuuuuuuuucuuuuuuugaaauaaaauagccugucuuucagaucucaaaggcucuuuucagagccaccaaaaaaaaaaaaaaaaaaaaaaaaaaaaaaaaaaaaaaaaaaaaaaaaaaaaaaaaaaaaaaaaagaauu

SEQ ID NO: 9338 - RNA, 1367 nt, Artificial Sequence
  mRNA Design a-3 (hSL-A64-N5) comprising derived and/or modified sequence from Pf(3D7)__XP_001351122.1__HsALB_Pf-CSP(19-272)_L(AAY)_Pf-CSP(346-3 75)_L(AAY)_Pf-CSP(310-327)_L(AAY)_PADRE (opt5)
aggagagggcgcuuggcuugcaaggacccugagcugcggcauugaagcacacccaacccaacucgacugaagucagccucacugaaccggaucugagaaucuucucucucugggcuugccagggcucuccgaaccuagcuagcauccucuucaauuccaacuagaaagcuuaccaugaagugggugaccuucaucagccugcucuuucuguucuccucugccuacagccuuuuucaggaguaucaaugcuacggcuccucuagcaacacaagaguccugaaugaacucaacuaugacaaugcugggacgaaccuguacaaugagcuugaaaugaacuauuacggaaaacaggagaauugguauucccugaagaaaaacucucggagccucggcgaaaaugaugacgggaacaaugaggauaacgagaagcugcgcaaacccaagcacaagaaacugaagcagccugccgacggaaauccggaucccaacgcgaauccuaacguugaccccaacgcuaauccuaacguggaucccaaugccaacccuaauguggacccgaacgccaaucccaacgcuaauccuaacgccaaucccaacgcuaauccuaacgccaaucccaacgcgaacccgaaugccaacccuaaugcuaaccccaaugccaacccuaaugcuaaccccaaugccaaccccaaugcgaacccuaaugccaacccgaaugcuaaccccaacgccaauccuaacgcuaaucccaacgccaauccuaacgucgaucccaaugccaacccgaaugcuaacccuaaugcgaaccccaaugccaacccuaaugcuaaccccaacgccaauccuaacgccaaucccaacgcuaauccgaacgccaauccuaacgcgaaucccaacgcuaaucccaacgccaauccuaacgccaauccgaacgcuaaucccaacgccaacccuaaugcuaaccccaaugccaacccuaaugcgaaccccgccgcuuacauuaaaccuggcuccgccaauaagcccaaagacgaacucgauuacgcuaacgacaucgagaagaagauuuguaaaauggaaaagugcagcgccgcguaugagccgucugauaaacauaucaaggaguaccugaauaaaauucagaacucccuugccgcuuaugccaaguucguggcugccuggacccugaaagccgcugcgugaggacuagucccuguucccagagcccacuuuuuuuucuuuuuuugaaauaaaauagccugucuuucagaucucaaaggcucuuuucagagccaccaaaaaaaaaaaaaaaaaaaaaaaaaaaaaaaaaaaaaaaaaaaaaaaaaaaaaaaaaaaaaaaaagaauu

SEQ ID NO: 9339 - RNA, 1367 nt, Artificial Sequence
  mRNA Design a-3 (hSL-A64-N5) comprising derived and/or modified sequence from Pf(3D7)__XP_001351122.1__HsALB_Pf-CSP(19-272)_L(AAY)_Pf-CSP(310-3 27)_L(AAY)_Pf-CSP(346-375)_L(AAY)_PADRE (opt5)
aggagagggcgcuuggcuugcaaggacccugagcugcggcauugaagcacacccaacccaacucgacugaagucagccucacugaaccggaucugagaaucuucucucucugggcuugccagggcucuccgaaccuagcuagcauccucuucaauuccaacuagaaagcuuaccaugaagugggugaccuucaucagccugcucuuucuguucuccucugccuacagccuuuuucaggaguaucaaugcuacggcuccucuagcaacacaagaguccugaaugaacucaacuaugacaaugcugggacgaaccuguacaaugagcuugaaaugaacuauuacggaaaacaggagaauugguauucccugaagaaaaacucucggagccucggcgaaaaugaugacgggaacaaugaggauaacgagaagcugcgcaaacccaagcacaagaaacugaagcagccugccgacggaaauccggaucccaacgcgaauccuaacguugaccccaacgcuaauccuaacguggaucccaaugccaacccuaauguggacccgaacgccaaucccaacgcuaauccuaacgccaaucccaacgcuaauccuaacgccaaucccaacgcgaacccgaaugccaacccuaaugcuaaccccaaugccaacccuaaugcuaaccccaaugccaaccccaaugcgaacccuaaugccaacccgaaugcuaaccccaacgccaauccuaacgcuaaucccaacgccaauccuaacgucgaucccaaugccaacccgaaugcuaacccuaaugcgaaccccaaugccaacccuaaugcuaaccccaacgccaauccuaacgccaaucccaacgcuaauccgaacgccaauccuaacgcgaaucccaacgcuaaucccaacgccaauccuaacgccaauccgaacgcuaaucccaacgccaacccuaaugcuaaccccaaugccaacccuaaugcgaaccccgccgcuuacgaaccuuccgacaaacauauuaaggaguaccucaauaaaauccagaacagccuggccgcuuauauuaagcccggcucugccaauaagccgaaagaugaacuugacuacgcgaacgauaucgagaagaaaauuuguaagauggagaaaugcuccgccgcuuaugccaaguucguggcugccuggacccugaaagccgcugcgugaggacuagucccuguucccagagcccacuuuuuuuucuuuuuuugaaauaaaauagccugucuuucagaucucaaaggcucuuuucagagccaccaaaaaaaaaaaaaaaaaaaaaaaaaaaaaaaaaaaaaaaaaaaaaaaaaaaaaaaaaaaaaaaaagaauu

SEQ ID NO: 9340 - RNA, 1421 nt, Artificial Sequence
  mRNA Design a-3 (hSL-A64-N5) comprising derived and/or modified sequence from Pf(3D7)__XP_001351122.1__HsALB_Pf-CSP(19-272)_L(AAY)_Pf-CSP(310-3 27)_L(AAY)_Pf-CSP(346-375)_L(AAY)_PADRE_L(AAY)_P2 (opt5)
aggagagggcgcuuggcuugcaaggacccugagcugcggcauugaagcacacccaacccaacucgacugaagucagccucacugaaccggaucugagaaucuucucucucugggcuugccagggcucuccgaaccuagcuagcauccucuucaauuccaacuagaaagcuuaccaugaagugggugaccuucaucagccugcucuuucuguucuccucugccuacagccuuuuucaggaguaucaaugcuacggcuccucuagcaacacaagaguccugaaugaacucaacuaugacaaugcugggacgaaccuguacaaugagcuugaaaugaacuauuacggaaaacaggagaauugguauucccugaagaaaaacucucggagccucggcgaaaaugaugacgggaacaaugaggauaacgagaagcugcgcaaacccaagcacaagaaacugaagcagccugccgacggaaauccggaucccaacgcgaauccuaacguugaccccaacgcuaauccuaacguggaucccaaugccaacccuaauguggacccgaacgccaaucccaacgcuaauccuaacgccaaucccaacgcuaauccuaacgccaaucccaacgcgaacccgaaugccaacccuaaugcuaaccccaaugccaacccuaaugcuaaccccaaugccaaccccaaugcgaacccuaaugccaacccgaaugcuaaccccaacgccaauccuaacgcuaaucccaacgccaauccuaacgucgaucccaaugccaacccgaaugcuaacccuaaugcgaaccccaaugccaacccuaaugcuaaccccaacgccaauccuaacgccaaucccaacgcuaauccgaacgccaauccuaacgcgaaucccaacgcuaaucccaacgccaauccuaacgccaauccgaacgcuaaucccaacgccaacccuaaugcuaaccccaaugccaacccuaaugcgaaccccgccgcuuacgaaccuuccgacaaacauauuaaggaguaccucaauaaaauccagaacagccuggccgcuuauauuaagcccggcucugccaauaagccgaaagaugaacuugacuacgcgaacgauaucgagaagaaaauuuguaagauggagaaaugcuccgccgcuuaugccaaguucguggcugccuggacccugaaagccgcugcggccgcuuaccaauauaucaaggccaauagcaaguuuaucgggauuacagaacucugaggacuagucccuguucccagagcccacuuuuuuuucuuuuuuugaaauaaaauagccugucuuucagaucucaaaggcucuuuucagagccaccaaaaaaaaaaaaaaaaaaaaaaaaaaaaaaaaaaaaaaaaaaaaaaaaaaaaaaaaaaaaaaaaagaauu

SEQ ID NO: 9341 - RNA, 1385 nt, Artificial Sequence
  mRNA Design a-3 (hSL-A64-N5) comprising derived and/or modified sequence from Pf(3D7)__XP_001351122.1__HsALB_Pf-CSP(19-272)_L(AAY)_Pf-CSP(310-3 27)_Linker (AAY)_Pf-CSP(346-397) (opt5)
aggagagggcgcuuggcuugcaaggacccugagcugcggcauugaagcacacccaacccaacucgacugaagucagccucacugaaccggaucugagaaucuucucucucugggcuugccagggcucuccgaaccuagcuagcauccucuucaauuccaacuagaaagcuuaccaugaagugggugaccuucaucagccugcucuuucuguucuccucugccuacagccuuuuucaggaguaucaaugcuacggcuccucuagcaacacaagaguccugaaugaacucaacuaugacaaugcugggacgaaccuguacaaugagcuugaaaugaacuauuacggaaaacaggagaauugguauucccugaagaaaaacucucggagccucggcgaaaaugaugacgggaacaaugaggauaacgagaagcugcgcaaacccaagcacaagaaacugaagcagccugccgacggaaauccggaucccaacgcgaauccuaacguugaccccaacgcuaauccuaacguggaucccaaugccaacccuaauguggacccgaacgccaaucccaacgcuaauccuaacgccaaucccaacgcuaauccuaacgccaaucccaacgcgaacccgaaugccaacccuaaugcuaaccccaaugccaacccuaaugcuaaccccaaugccaaccccaaugcgaacccuaaugccaacccgaaugcuaaccccaacgccaauccuaacgcuaaucccaacgccaauccuaacgucgaucccaaugccaacccgaaugcuaacccuaaugcgaaccccaaugccaacccuaaugcuaaccccaacgccaauccuaacgccaaucccaacgcuaauccgaacgccaauccuaacgcgaaucccaacgcuaaucccaacgccaauccuaacgccaauccgaacgcuaaucccaacgccaacccuaaugcuaaccccaaugccaacccuaaugcgaaccccgccgcuuacgaaccuuccgacaaacauauuaaggaguaccucaauaaaauccagaacagccuggccgcuuauauuaagcccggcucugccaauaagccgaaagaugaacuugacuacgcgaacgauaucgagaagaaaauuuguaagauggagaaaugcuccagcguguucaauguugugaacucuuccaucgggcugaucaugguccucagcuuucuguuccuuaauugaggacuagucccuguucccagagcccacuuuuuuuucuuuuuuugaaauaaaauagccugucuuucagaucucaaaggcucuuuucagagccaccaaaaaaaaaaaaaaaaaaaaaaaaaaaaaaaaaaaaaaaaaaaaaaaaaaaaaaaaaaaaaaaaagaauu

SEQ ID NO: 9342 - RNA, 1985 nt, Artificial Sequence
  mRNA Design a-3 (hSL-A64-N5) comprising derived and/or modified sequence from Pf(3D7)__XP_001351122.1__LumSynt_L(GGS4-GGG)_Pf-CSP(19-397) (opt6)
aggagagggcgcuuggcuugcaaggacccugagcugcggcauugaagcacacccaacccaacucgacugaagucagccucacugaaccggaucugagaaucuucucucucugggcuugccagggcucuccgaaccuagcuagcauccucuucaauuccaacuagaaagcuuaccaugcaaauauacgaaggaaaacuaacagcagaaggauuacgauucggcauaguagcaucaagguucaaccacgcauuaguagauagacuaguagaaggagcaauagacgcaauaguccgacauggaggacgagaagaagauauaacacuagucagaguaccagggagcugggaaaucccaguagcagcaggagaacucgcaagaaaagaagauaucgacgccguaaucgcaaucgggguacuaauaagaggcgcaacaccccauuucgacuacauagcaagcgaaguaucaaaaggauuagcagaccuaaguuuagaacuaagaaaaccuauuacauucggcgucauaacggcagacacauuagaacaagccaucgaaagagcaggaacaaaacacggaaacaaaggcugggaagcagcacuaagcgcaauugaaauggcaaauuuauucaaaucccuaagaggcggcucagguggcaguggaggaucaggaggaucaggaggaggccuauuccaagaauaucaaugcuacggaucgagcucgaauacacgcguauuaaacgaauuaaacuacgacaacgcaggaacaaaccuauacaacgaacuagaaaugaacuauuauggaaaacaagagaacugguacucccuaaaaaaaaacagucgaagcuuaggagaaaaugacgacggaaauaacgaagacaacgaaaaacuaagaaaacccaaacauaaaaaauuaaaacaacccgcugacggaaacccagacccaaacgcuaacccgaacguugauccaaaugcaaacccaaauguggauccaaaugcaaaccccaacguagauccaaaugcaaacccaaacgcaaaccccaaugccaacccaaacgccaacccuaaugcuaauccaaacgcaaacccaaacgcaaacccgaacgcaaauccaaacgcaaacccuaaugcuaacccaaaugcaaauccaaacgcaaacccaaacgcuaacccaaacgcaaacccaaaugcaaacccaaaugcaaacccaaacgcaaauccaaacguagacccaaacgcaaauccaaacgcaaauccaaacgcaaacccaaacgccaaccccaaugcaaauccgaacgcaaacccaaacgcaaacccaaacgcaaacccaaacgcaaacccaaaugccaacccaaacgcaaacccgaacgcaaacccaaacgcaaacccaaacgcaaacccuaaugcgaacccaaaugccaacccaaacgcaaaccccaacgcuaacccaaacaaaaacaaucaaggaaacggacaagggcacaacaugccaaacgauccaaacagaaaugucgacgaaaacgccaaugcaaacagugccguaaaaaauaauaacaacgaagaaccuucagacaaacacauaaaagaauacuuaaacaaaauacaaaacucauuaucaaccgaauggagcccauguucuguuacaugcggaaauggaauacaaguaagaauaaaaccaggaucagcaaacaaaccaaaagacgaauuagacuacgcaaaugauauagaaaaaaaaauaugcaagauggaaaaaugcaguucuguauuuaacguaguaaacagcucaauaggucuaauaaugguacuauccuuucuuuuccugaacuaaggacuagucccuguucccagagcccacuuuuuuuucuuuuuuugaaauaaaauagccugucuuucagaucucaaaggcucuuuucagagccaccaaaaaaaaaaaaaaaaaaaaaaaaaaaaaaaaaaaaaaaaaaaaaaaaaaaaaaaaaaaaaaaaagaauu

SEQ ID NO: 9343 - RNA, 1847 nt, Artificial Sequence
  mRNA Design a-3 (hSL-A64-N5) comprising derived and/or modified sequence from Pf(3D7)__XP_001351122.1__HsALB_Pf-CSP(19-272)_L(PVTN)_HBsAg (opt6)
aggagagggcgcuuggcuugcaaggacccugagcugcggcauugaagcacacccaacccaacucgacugaagucagccucacugaaccggaucugagaaucuucucucucugggcuugccagggcucuccgaaccuagcuagcauccucuucaauuccaacuagaaagcuuaccaugaaauggguaaccuucaucucacuauuauucuuauuuucaucugcauacucacucuuccaagaauaccaaugcuacgguucaucuucuaacacaagaguacuaaacgaacuaaacuacgacaacgcaggaacaaaccucuauaacgaacuugaaaugaacuacuauggaaaacaagaaaacugguauucccuaaaaaaaaacucaagauccuuaggagaaaacgacgacggaaauaacgaagacaacgaaaaacuaagaaaaccaaaacacaaaaaacuaaaacaacccgcagacggaaacccagacccaaacgcaaacccaaacguagacccaaacgcaaacccaaacgucgacccaaacgccaauccaaacguagacccaaacgcuaacccaaacgccaauccaaacgcaaauccaaaugccaacccaaacgcaaacccaaaugcgaauccaaaugcaaaccccaaugcaaacccaaacgcaaauccaaacgcaaacccaaacgcaaacccuaacgcaaauccaaaugcaaacccuaacgcaaacccaaacgcaaauccaaacgcaaacccaaaugcaaauccaaacgucgacccaaacgcaaacccgaacgcaaacccaaacgcaaacccaaaugcaaauccaaaugcaaaccccaaugcaaacccaaacgcaaacccaaacgcuaacccaaaugcaaacccaaacgcaaacccaaacgcaaauccaaacgcaaacccaaacgcaaacccaaaugcaaacccaaacgcaaaccccaaugcaaauccaaacgcaaacccaaacgcaaacccacccguaaccaacauggaaaacaucacaucaggauuccuuggaccccucuuaguacuucaagcaggauucuuccuauuaacaagaauacuaacaauaccucaaucuuuagauucaugguggacuucauuaaauuuccuaggaggaagcccaguaugcuuaggacaaaacagccaaucaccaaccucaaaccacucaccaaccucaugcccaccaauaugcccaggauaccgauggaugugccuaagaagauucauaauauucuuauucauacuacuacuaugccucauauucuuacuaguacuauuagacuaccaaggaaugcugccagucugcccacuuauaccagguagcaccaccacuaacacaggaccuugcaaaacaugcacaacacccgcucaaggaaauucuauguuuccaucaugcugcugcacuaaacccacagauggcaauuguacaugcauaccaauccccucaucaugggcauuugccaaauacuuaugggaaugggcaucuguaagauucucuuggcuaucacucuuaguaccauucguacaaugguucguaggccuauccccuacaguauggcuauccgcaauauggaugaugugguacuggggaccaucacuauacucaauagucucacccuucauaccacuauuaccaauauucuucugccuauggguauauauauaaggacuagucccuguucccagagcccacuuuuuuuucuuuuuuugaaauaaaauagccugucuuucagaucucaaaggcucuuuucagagccaccaaaaaaaaaaaaaaaaaaaaaaaaaaaaaaaaaaaaaaaaaaaaaaaaaaaaaaaaaaaaaaaaagaauu

SEQ ID NO: 9344 - RNA, 1964 nt, Artificial Sequence
  mRNA Design a-3 (hSL-A64-N5) comprising derived and/or modified sequence from Pf(3D7)__XP_001351122.1__HsALB_Pf-CSP(19-272)_L(AAY)_Pf-CSP(346-3 65)_L(AAY)_PADRE_L(PVTN)_HBsAg (opt6)
aggagagggcgcuuggcuugcaaggacccugagcugcggcauugaagcacacccaacccaacucgacugaagucagccucacugaaccggaucugagaaucuucucucucugggcuugccagggcucuccgaaccuagcuagcauccucuucaauuccaacuagaaagcuuaccaugaaaugggucaccuucauuuccuuauuauucuuauuuucguccgcauacucacuauuucaagaauaucaauguuacggaucaagcucaaacacccgcguacucaacgaacuaaacuacgacaacgcaggaacaaaccuauauaacgaacuagaaaugaauuauuacggaaaacaagaaaacugguauucacuuaaaaaaaacuccagaucccuuggcgaaaacgacgacggaaauaaugaagacaacgaaaaacuuagaaaaccaaaacauaaaaaacuaaaacaaccugcagacgguaacccagauccaaaugcuaacccaaauguagacccuaacgcuaacccaaacguagauccaaacgccaacccaaacguagauccaaacgcaaacccaaacgcaaauccaaaugcaaacccaaacgccaaccccaacgcaaacccaaaugcaaauccuaaugcaaaucccaacgcaaauccaaacgcaaauccaaaugcaaaccccaacgcaaacccaaaugcaaauccaaaugcaaauccaaaugcaaacccaaacgcaaacccaaaugcaaauccuaacgcaaacccaaacgucgaccccaacgcaaauccaaacgcaaacccaaacgcaaaccccaaugcaaacccaaaugcaaacccaaacgcaaacccaaacgcaaaccccaacgcaaauccaaacgcaaauccaaaugcaaauccaaacgcaaaccccaaugcaaaccccaaugcuaacccaaacgccaaucccaacgcaaacccaaacgcaaaucccaacgcaaauccaaacgcaaacccugcagcauacauaaaacccggcucugcuaauaaacccaaagaugaacucgacuaugccaacgacauagaagcagccuacgcaaaauucguagcugcauggacauuaaaagcagcagcaccagugacaaacauggaaaacauuacaucaggauucuuagguccauuauuaguccuccaagcaggauucuucuuacuaacuagaauauuaacaauaccacaaucccuagacucuugguggacuucacuaaauuuccuaggaggauccccaguaugucucggucaaaauucucaaucaccuacaucaaaccauucaccaacaagcugccccccaaucugucccggauacagauggaugugccuacgcagauucauuauauuucuauucauacuacuucuaugccuaauauuccuacuaguccuucuagacuaccaaggaaugcuacccguaugcccacuuauaccaggauccacaacaacaaacacagguccaugcaaaacaugcacaacaccagcccaagguaauucuauguucccaucaugcuguugcacaaaaccaacagacgguaacugcacaugcaucccaauacccucaucaugggcauucgcaaaauaccuaugggaaugggcuucaguaagauucuccugguuaucccuuuuagucccauucguacaaugguucguaggauuaucacccacuguauggcuaucagcaauauggaugaugugguauuggggcccaucucuuuacucaaucgucuccccuuuuauuccacuacuacccauauuuuucugccuauggguauacauuuaaggacuagucccuguucccagagcccacuuuuuuuucuuuuuuugaaauaaaauagccugucuuucagaucucaaaggcucuuuucagagccaccaaaaaaaaaaaaaaaaaaaaaaaaaaaaaaaaaaaaaaaaaaaaaaaaaaaaaaaaaaaaaaaaagaauu

SEQ ID NO: 9345 - RNA, 2183 nt, Artificial Sequence
  mRNA Design a-3 (hSL-A64-N5) comprising derived and/or modified sequence from Pf(3D7)__XP_001351122.1__HsALB_Pf-CSP(19-384)_L(PVTN)_HBsAg (opt6)
aggagagggcgcuuggcuugcaaggacccugagcugcggcauugaagcacacccaacccaacucgacugaagucagccucacugaaccggaucugagaaucuucucucucugggcuugccagggcucuccgaaccuagcuagcauccucuucaauuccaacuagaaagcuuaccaugaaauggguaaccuucauaucucucuuauuccuuuuuucaucugcauauucacuauuucaagaauaucaauguuauggaucaucaucaaacacccgaguacucaacgaauuaaauuacgacaacgcagguacuaacuuauacaacgaauuagaaaugaauuacuauggaaaacaagaaaacugguauucccucaaaaaaaacucucgaucucuaggcgaaaacgacgacggcaacaacgaagacaacgaaaaacuacguaaacccaaacacaaaaaacuaaaacaaccagcagauggaaacccagacccaaacgcaaacccaaacguagacccaaacgcaaauccaaacguagacccgaacgcaaauccaaauguagaucccaaugcuaauccaaaugccaacccaaacgcaaacccuaacgcuaaucccaacgcaaacccaaacgcaaacccaaaugcaaacccaaacgcaaaccccaacgcaaacccaaaugcaaauccaaaugcaaauccaaacgccaacccaaaugccaacccaaacgcaaauccaaacgcuaaccccaacgcaaaccccaacgccaaucccaacguagaccccaacgcaaacccaaaugcaaauccaaacgcaaaccccaaugcaaacccaaacgcuaacccuaaugcaaacccaaacgccaacccaaaugcaaaccccaacgccaacccaaacgcaaauccaaacgcaaacccaaacgcuaacccaaacgccaacccaaacgcaaacccaaacgcuaacccaaacgcaaacccaaaugcaaacccaaaugcuaauccaaauaaaaacaaccaaggaaacggccaaggacauaauaugccuaacgacccaaacagaaacguagacgaaaaugcaaacgcaaacuccgcaguaaaaaauaacaauaacgaagaacccuccgacaaacauauaaaagaauaucuaaacaaaauacaaaauucacucucuacugaaugguccccaugcucaguaacauguggaaacggaauccaaguacgcauaaaaccaggaucagcaaacaaaccaaaagacgaacuagacuacgcaaacgauauagaaaaaaaaauaugcaaaauggaaaaaugcuccuccguauucaacguagucaauucaucuccaguaaccaauauggaaaauauaaccuccggauuccuaggaccacuacucguuuuacaagcaggauucuucuuacuaacaagaauacucacuauaccacaaucccuggauucuugguggacaucccuaaauuucuuaggcggaucacccguaugccuaggccaaaauagccaaaguccaacuucaaaccacuccccaacuucuugcccaccaauaugccccggcuacagauggaugugccuucgacgauucauaauauuucuauucauacuauuacuaugucuaauauuccuacucguucuauuagacuaccaaggaauguuaccaguuugcccacuaauaccugguucaacaaccacuaacacuggucccugcaaaacauguaccaccccagcccaaggaaacucaauguuccccucaugcuguugcacaaaaccaaccgacggaaauugcacaugcauacccauaccaucuucuugggcauuugcuaaauaucuaugggaaugggcaucaguacgcuucucauggcuaucucuacuaguaccauucguccaaugguucguaggccuaucaccaacaguauggcuaucugcaauauggaugaugugguacuggggucccuccuuauauucaauuguaucaccuuuuaucccacuccuacccauauucuucuguuuauggguauacauauaaggacuagucccuguucccagagcccacuuuuuuuucuuuuuuugaaauaaaauagccugucuuucagaucucaaaggcucuuuucagagccaccaaaaaaaaaaaaaaaaaaaaaaaaaaaaaaaaaaaaaaaaaaaaaaaaaaaaaaaaaaaaaaaaagaauu

SEQ ID NO: 9346 - RNA, 2000 nt, Artificial Sequence
  mRNA Design a-3 (hSL-A64-N5) comprising derived and/or modified sequence from Pf(3D7)__XP_001351122.1__HsALB_Pf-CSP(19-384)_L(SGG)_Ferritin (opt6)
aggagagggcgcuuggcuugcaaggacccugagcugcggcauugaagcacacccaacccaacucgacugaagucagccucacugaaccggaucugagaaucuucucucucugggcuugccagggcucuccgaaccuagcuagcauccucuucaauuccaacuagaaagcuuaccaugaaauggguaacauuuauaucucuauuauucuuauucuccucagcauacucacucuuucaagaauaccaaugcuacgguucuucauccaacacacgaguccuaaacgaauuaaacuacgacaaugcaggaaccaaucuauacaaugaacuugaaaugaacuacuacggaaaacaagaaaacugguacucccuaaaaaaaaacucacgaagccuaggagaaaaugacgacggaaacaacgaagacaacgaaaaacuacgaaaacccaaacacaaaaaacuaaaacaacccgccgacggcaauccagauccaaacgcaaacccaaacguagaccccaacgccaacccaaacguagauccaaacgcaaauccaaauguugauccaaaugcaaaccccaacgcaaacccaaacgcaaacccaaacgcaaacccaaacgcaaacccaaacgcaaauccaaaugcaaaucccaacgcaaauccaaacgcaaauccaaaugcaaacccaaacgcuaaucccaacgcuaacccaaacgcaaacccaaacgcaaacccgaacgcuaacccaaacgcaaacccaaacgcaaaccccaacguagacccaaacgcaaacccaaacgcaaaccccaacgcaaacccaaacgcaaacccaaacgcaaaccccaacgcaaaccccaacgcaaacccaaacgccaaccccaaugcaaacccaaacgccaacccaaacgcaaacccaaacgcaaacccaaacgcaaacccaaacgcaaauccaaacgcaaacccaaacgcaaacccaaacgcaaacccaaaugcaaacccaaacaaaaacaaccaaggaaauggacaaggacacaacaugccaaacgacccaaaccguaacguagaugaaaaugccaacgcaaacucagccguaaaaaacaacaacaacgaagaaccuucagacaaacacauaaaagaauacuuaaacaaaauacaaaacucauuaucaacugaauggucccccuguucagucacaugcggaaauggaauacaaguaagaauuaaaccagguucagccaacaaaccaaaagacgaacuagacuacgcaaacgacauugaaaaaaaaauauguaaaauggaaaaauguaguucagucuucaacguaguaaacucaucauccggaggauuauccaaagacauaauaaaacucuuaaaugaacaaguaaacaaagaaaugaacucgagcaaccucuauaugucaaugucauccuggugcuacacccauucccuagacggcgccggacuauuccuguucgaccaugcagcagaagaauaugaacacgcaaaaaagcuaaucaucuucuuaaacgaaaacaaugucccaguacaacuaaccuccauaucagcaccugaacauaaauucgaaggacuaacacaaauauuucaaaaagcauacgaacacgaacaacacauaucagaaucaauuaauaacauaguagaccacgcaaucaaaagcaaggaccacgcaacauucaacuuucuacaaugguacguagcagaacaacaugaagaagaaguacucuucaaagacaucuuagacaaaauugaacucauaggaaacgaaaaucacggacucuaccucgcagaccaguacguaaaaggaaucgcaaaaucacguaaaagcuaaggacuagucccuguucccagagcccacuuuuuuuucuuuuuuugaaauaaaauagccugucuuucagaucucaaaggcucuuuucagagccaccaaaaaaaaaaaaaaaaaaaaaaaaaaaaaaaaaaaaaaaaaaaaaaaaaaaaaaaaaaaaaaaaagaauu

SEQ ID NO: 9347 - RNA, 1961 nt, Artificial Sequence
  mRNA Design a-3 (hSL-A64-N5) comprising derived and/or modified sequence from Pf(3D7)__XP_001351122.1__HsALB_Pf-CSP(93-384)_L(PVTN)_HBsAg (opt6)
aggagagggcgcuuggcuugcaaggacccugagcugcggcauugaagcacacccaacccaacucgacugaagucagccucacugaaccggaucugagaaucuucucucucugggcuugccagggcucuccgaaccuagcuagcauccucuucaauuccaacuagaaagcuuaccaugaaauggguaacuuuuauaucccuccuauuucuauuuucaucagccuauucaaaacuaaaacaacccgcagauggaaaucccgacccaaaugcaaauccaaauguagauccaaacgccaacccaaaugucgacccaaaugcaaacccaaacguagauccuaacgcaaacccaaaugcuaauccaaacgcuaacccaaacgcaaauccaaaugcuaacccaaacgcaaacccuaacgcaaacccaaacgcuaacccaaacgcaaacccaaacgccaacccaaacgcaaaccccaacgcaaacccuaacgcaaacccaaacgcaaacccaaaugccaacccaaacgcaaacccaaacgcaaacccaaacguagaccccaacgcuaauccaaaugcaaauccaaacgcaaacccaaaugccaacccaaacgccaacccuaaugcaaacccaaacgcaaacccaaaugcaaaccccaacgcaaauccaaacgcaaauccaaaugcaaacccaaacgcuaacccaaacgcaaaccccaaugcaaacccaaacgcaaauccaaaugcaaacccaaaugcaaauccaaaugcaaacccaaauaaaaacaaccaaggaaacggacaaggccauaacaugccaaacgacccaaaccgcaacgucgaugaaaacgccaacgcaaauucagcgguuaaaaacaacaacaaugaagaacccucagacaaacacauaaaagaauacuuaaacaaaauacaaaacucacuaucgacagaaugguccccaugcuccguaaccugcgguaauggaauacaagucagaauaaaaccaggaucagcuaauaaaccaaaagacgaauuagacuacgcaaacgacauagaaaagaaaauaugcaaaauggaaaaauguucuucaguauuuaacguagucaacucaucacccguaacuaacauggaaaacauaaccucaggauuucuagguccuuuacucguacuacaagcaggauuuuuccuacuuacccgaauccuaacaauaccucaaucucuagacucaugguggacaucccuaaauuucuuaggcggaucaccaguuugccucggacaaaacucucaaucaccaacuucaaaucacuccccaacaucuugcccaccaauaugcccaggauaucgauggaugugucuacgacguuuuauaauauuucuauuuauacuacuacucugucuaauauuccuauuaguacuacucgacuaucaaggaaugcuccccgucuguccccucauacccggaucaacaacuacaaacaccggaccgugcaaaaccugcacaaccccagcucaaggaaauucaauguucccaucaugcugcuguacaaaaccaacagauggaaacugcacaugcauaccaaucccaucaagcugggccuuugccaaauauuuaugggaaugggccuccgucagauucucauggcucucccuucuaguuccauucguacaaugguuuguaggccuauccccaaccguauggcuauccgccauauggaugaugugguauuggggaccaucacuauacucaauaguauccccauucauaccacuccuacccauauucuuuugccuauggguauacauuuaaggacuagucccuguucccagagcccacuuuuuuuucuuuuuuugaaauaaaauagccugucuuucagaucucaaaggcucuuuucagagccaccaaaaaaaaaaaaaaaaaaaaaaaaaaaaaaaaaaaaaaaaaaaaaaaaaaaaaaaaaaaaaaaaagaauu

SEQ ID NO: 9348 - RNA, 1622 nt, Artificial Sequence
  mRNA Design a-3 (hSL-A64-N5) comprising derived and/or modified sequence from Pf(3D7)__XP_001351122.1__HsALB_Pf-CSP(199-377)_L(PVTN)_HBsAg (opt6)
aggagagggcgcuuggcuugcaaggacccugagcugcggcauugaagcacacccaacccaacucgacugaagucagccucacugaaccggaucugagaaucuucucucucugggcuugccagggcucuccgaaccuagcuagcauccucuucaauuccaacuagaaagcuuaccaugaaauggguaacauucauaucauuacucuucuuauuuuccucugcauacucagauccaaaugcaaacccaaaugcaaacccaaacgcaaacccaaaugccaauccaaaugcaaacccaaaugcaaacccaaacgcaaacccaaacgcaaacccaaacgcaaacccuaaugcaaacccaaaugcaaauccaaacgcuaacccaaacgcaaacccaaaugccaacccaaacgccaauccaaacgcaaacccaaacgcaaaucccaaugcaaacccuaacaaaaacaaucaaggaaacggacaaggccacaacaugccaaaugacccaaaccgcaauguagacgaaaaugccaacgcaaacuccgcuguaaaaaacaauaacaacgaagaaccuuccgauaaacauauaaaagaauacuuaaauaaaauacaaaauucauuaucaacagaauggucaccaugcucagucacaugcggaaauggaauacaaguaagaauaaaacccgguuccgcaaacaaaccaaaagacgaacuagacuacgcaaaugacaucgaaaaaaaaauaugcaaaauggaaaaauguucuucaguaccaguaacaaacauggaaaacaucaccucuggauuccuaggaccacuauuaguacuacaagcaggauucuuccuccuaacaagaauauuaacaauaccacaaucacuugacucaugguggacaucccucaauuuccuaggaggauccccaguaugucuaggucaaaacucucaaucuccaacauccaaccauucacccacaucaugcccucccauaugcccaggauaccgauggaugugccucagaagauucauaauauuccuauucauauuacuccuauguuuaaucuuucuacuagucuuauuagacuaccaaggaaugcuaccaguaugcccacuaaucccaggauccacaacaacaaacacaggccccugcaaaacauguacaacaccagcacaaggaaacucaauguucccaucaugcuguugcacaaaaccaacagacggaaacugcacaugcaucccaauaccaucaucuugggcauuugcaaaauacuuaugggaaugggcaucaguacgcuuuucauggcucucccuccucguaccauucguccaaugguucguaggucuaucaccaacaguuuggcuauccgcuauauggaugaugugguauuggggcccuucccuauacucaauaguuucaccauuuauaccacuccuaccaauauuuuucugccuuuggguauacauauaaggacuagucccuguucccagagcccacuuuuuuuucuuuuuuugaaauaaaauagccugucuuucagaucucaaaggcucuuuucagagccaccaaaaaaaaaaaaaaaaaaaaaaaaaaaaaaaaaaaaaaaaaaaaaaaaaaaaaaaaaaaaaaaaagaauu

SEQ ID NO: 9349 - RNA, 1319 nt, Artificial Sequence
  mRNA Design a-3 (hSL-A64-N5) comprising derived and/or modified sequence from Pf(3D7)__XP_001351122.1__HsALB_Pf-CSP(19-272)_L(AAY)_Pf-CSP(346-3 75)_L(AAY)_Pf-CSP(310-327) (opt6)
aggagagggcgcuuggcuugcaaggacccugagcugcggcauugaagcacacccaacccaacucgacugaagucagccucacugaaccggaucugagaaucuucucucucugggcuugccagggcucuccgaaccuagcuagcauccucuucaauuccaacuagaaagcuuaccaugaaauggguaaccuucauuucacuucucuuccuauucuccagcgcauacucacucuuccaagaauaccaaugcuacggcucaaguuccaacacacgaguacuaaacgaauuaaacuacgacaaugcuggaaccaaccuauacaacgaacucgaaaugaacuacuacgguaaacaagaaaacugguauucacuaaaaaaaaacucaaggucccuaggagaaaacgacgacggaaacaacgaagacaacgaaaaauuaagaaaaccaaaacacaaaaaacuaaaacaacccgcagacggaaaccccgacccaaacgcaaacccaaacguagauccaaacgcaaacccaaacguagacccaaacgcaaacccaaacguagacccaaacgcaaacccuaaugcaaacccaaacgcaaacccaaacgcaaacccaaacgcaaacccaaacgcaaacccaaacgcaaaccccaacgccaacccaaacgcaaacccaaacgcaaacccaaacgcaaacccaaacgcaaacccaaacgcaaacccaaacgcaaacccaaacgcaaacccaaaugcaaacccaaacgcaaacccaaacguagacccaaacgcaaacccaaacgcaaacccaaaugcaaacccaaacgcaaacccaaacgcaaacccaaacgcuaacccaaacgcaaacccaaacgcuaauccaaaugcuaaccccaacgcaaacccaaaugcaaacccaaacgcuaauccaaaugcaaauccaaacgcaaacccaaacgcaaacccaaacgcaaacccaaacgcaaacccaaacgcaaauccagccgcauacauaaaacccggcucagcaaacaaaccaaaagacgaacuagacuacgccaacgacauagaaaaaaaaauaugcaaaauggaaaaaugcucagccgcauacgaaccaucagacaaacacaucaaagaauacuuaaacaaaauacaaaacagcuuauaaggacuagucccuguucccagagcccacuuuuuuuucuuuuuuugaaauaaaauagccugucuuucagaucucaaaggcucuuuucagagccaccaaaaaaaaaaaaaaaaaaaaaaaaaaaaaaaaaaaaaaaaaaaaaaaaaaaaaaaaaaaaaaaaagaauu

SEQ ID NO: 9350 - RNA, 1367 nt, Artificial Sequence
  mRNA Design a-3 (hSL-A64-N5) comprising derived and/or modified sequence from Pf(3D7)__XP_001351122.1__HsALB_Pf-CSP(19-272)_L(AAY)_Pf-CSP(346-3 75)_L(AAY)_Pf-CSP(310-327)_L(AAY)_PADRE (opt6)
aggagagggcgcuuggcuugcaaggacccugagcugcggcauugaagcacacccaacccaacucgacugaagucagccucacugaaccggaucugagaaucuucucucucugggcuugccagggcucuccgaaccuagcuagcauccucuucaauuccaacuagaaagcuuaccaugaaauggguaacauucauaucacuacuauuccuauucucauccgccuacucacucuuucaagaauaucaaugcuacggaucaagcucaaauacaagaguacuaaacgaacuaaacuacgacaacgcaggaaccaaccuauacaacgaacuagaaaugaacuacuacggaaaacaagaaaacugguacucacuuaaaaaaaacucaagaucacuaggagaaaacgacgacggaaacaacgaagacaacgaaaaacuacgaaaaccaaaacauaaaaaacuaaaacaaccagcagacggaaacccagacccaaacgcaaauccaaacguagacccaaaugcaaacccaaacguagacccaaacgcaaacccaaacguagacccaaaugcaaacccaaacgcaaauccaaacgcaaacccaaacgcaaacccaaacgcaaacccaaacgcaaacccaaacgcaaacccaaaugcaaauccaaacgcaaacccaaaugcaaacccaaacgcaaacccaaacgcgaacccaaacgccaaccccaacgcaaacccaaacgcaaauccaaaugcaaacccaaacgccaauccaaacguagacccaaacgcaaauccaaacgcaaacccaaacgcaaacccaaacgcaaacccuaacgcaaacccaaacgcaaacccaaacgcaaacccaaacgccaacccaaacgcaaaccccaacgcaaacccaaacgcaaacccaaacgcaaaccccaacgcaaauccaaacgcuaacccaaacgcuaaccccaacgcaaacccaaaugcaaacccaaacgccaacccagccgcauacauaaaaccaggaucagcaaauaaaccaaaagacgaacuagacuacgcaaacgacauagaaaaaaaaauaugcaaaauggaaaaaugcuccgcagcauacgaaccaucagacaaacacaucaaagaauaccuaaacaaaauccaaaacucacuagccgccuacgcaaaauuugucgcagcauggacacucaaagcagcagcauaaggacuagucccuguucccagagcccacuuuuuuuucuuuuuuugaaauaaaauagccugucuuucagaucucaaaggcucuuuucagagccaccaaaaaaaaaaaaaaaaaaaaaaaaaaaaaaaaaaaaaaaaaaaaaaaaaaaaaaaaaaaaaaaaagaauu

SEQ ID NO: 9351 - RNA, 1367 nt, Artificial Sequence
  mRNA Design a-3 (hSL-A64-N5) comprising derived and/or modified sequence from Pf(3D7)__XP_001351122.1__HsALB_Pf-CSP(19-272)_L(AAY)_Pf-CSP(310-3 27)_L(AAY)_Pf-CSP(346-375)_L(AAY)_PADRE (opt6)
aggagagggcgcuuggcuugcaaggacccugagcugcggcauugaagcacacccaacccaacucgacugaagucagccucacugaaccggaucugagaaucuucucucucugggcuugccagggcucuccgaaccuagcuagcauccucuucaauuccaacuagaaagcuuaccaugaaauggguaaccuucauaucccuacuauuucuauucuccucagcauacucacuauuccaagaauaccaaugcuacggcucaucaucaaacacaagaguacuaaaugaacuaaacuacgacaacgccggaaccaaccuauacaaugaacucgaaaugaauuacuacggaaaacaagaaaacugguacucacuaaaaaaaaacucaagaagccuaggagaaaacgacgacggaaacaacgaagacaacgaaaaauuacgaaaaccaaaacauaaaaaacuaaaacaacccgccgacggaaacccagacccaaacgcaaacccaaacguagacccaaacgcaaauccaaacguagacccaaacgcaaauccaaauguagacccaaacgcaaacccaaacgcaaacccaaacgcaaacccaaacgcaaacccgaacgcaaauccaaacgcaaacccaaacgcaaacccaaacgcaaacccaaacgcaaacccaaacgcaaaccccaacgcaaacccaaaugcaaacccaaacgcaaacccaaaugcaaauccaaacgcaaacccaaacgcaaacccaaacgcaaacccaaacguagacccaaaugcaaaccccaacgcaaacccaaacgcaaacccaaacgcaaacccaaacgcaaacccaaacgcaaacccaaacgcaaacccaaacgcaaacccaaacgccaauccaaacgcaaauccaaacgcaaacccaaacgcaaacccaaacgcaaacccaaacgcaaacccaaacgcaaacccaaacgcaaacccaaaugcaaacccaaacgcaaacccagcagcauacgaaccuucagacaaacacauaaaagaauacuuaaacaaaauacaaaacucacuagcagccuacaucaaaccaggauccgcaaacaaaccaaaagacgaacuagacuacgcaaacgacauagaaaaaaaaauauguaaaauggaaaaaugcucagccgcauaugcuaaauucgucgcagcauggaccuuaaaagcagcagcauaaggacuagucccuguucccagagcccacuuuuuuuucuuuuuuugaaauaaaauagccugucuuucagaucucaaaggcucuuuucagagccaccaaaaaaaaaaaaaaaaaaaaaaaaaaaaaaaaaaaaaaaaaaaaaaaaaaaaaaaaaaaaaaaaagaauu

SEQ ID NO: 9352 - RNA, 1421 nt, Artificial Sequence
  mRNA Design a-3 (hSL-A64-N5) comprising derived and/or modified sequence from Pf(3D7)__XP_001351122.1__HsALB_Pf-CSP(19-272)_L(AAY)_Pf-CSP(310-3 27)_L(AAY)_Pf-CSP(346-375)_L(AAY)_PADRE_L(AAY)_P2 (opt6)
aggagagggcgcuuggcuugcaaggacccugagcugcggcauugaagcacacccaacccaacucgacugaagucagccucacugaaccggaucugagaaucuucucucucugggcuugccagggcucuccgaaccuagcuagcauccucuucaauuccaacuagaaagcuuaccaugaaaugggucaccuucaucucacuacuauuuuuauucuccagcgcauacucauuauuccaagaauaccaaugcuauggcucaagcucaaacacaagaguauuaaacgaacuaaacuacgauaacgccggaacaaaccuauacaacgaacucgaaaugaacuacuauggaaaacaagaaaacugguacucacuuaaaaaaaauucaagaucucuaggagaaaacgacgacggaaacaaugaagacaacgagaaauuaagaaaaccaaaacacaaaaaacuaaaacaaccagcagacggaaacccagacccaaacgcaaacccaaacguagacccaaacgcaaacccaaacguagacccaaacgcaaacccaaacguagauccgaacgcaaauccaaacgcaaauccaaacgcaaacccaaaugcaaacccaaaugcaaacccaaaugcaaacccaaacgcaaacccaaacgcaaacccaaacgcaaaccccaacgcaaacccaaacgcaaauccaaacgcaaacccaaacgcaaacccaaacgcaaaccccaacgcaaacccaaacgcaaacccgaacgcgaacccaaacguggauccaaacgcaaacccaaaugcaaaucccaacgcaaacccaaaugcaaacccaaacgcaaacccaaacgcaaacccaaacgcaaacccaaaugcaaacccaaacgcaaacccaaacgcaaacccaaacgcaaacccaaacgcaaauccaaacgcaaauccaaaugcaaacccaaacgcaaacccaaacgcaaaccccaacgcaaauccaaacgcaaacccagccgcauacgaaccaucagacaaacauauaaaagaauaucuaaacaaaauucaaaacucacucgcagcauacauaaaaccaggaagcgcaaacaaaccuaaagacgaacuagacuacgcaaacgacauagaaaaaaaaauaugcaaaauggaaaaaugcucagcagcguacgcaaaauucguagcagcauggacacuaaaagcagcagccgcagcauaccaauacauaaaagcaaauucaaaauucaucggaauuacagaacuauaaggacuagucccuguucccagagcccacuuuuuuuucuuuuuuugaaauaaaauagccugucuuucagaucucaaaggcucuuuucagagccaccaaaaaaaaaaaaaaaaaaaaaaaaaaaaaaaaaaaaaaaaaaaaaaaaaaaaaaaaaaaaaaaaagaauu

SEQ ID NO: 9353 - RNA, 1385 nt, Artificial Sequence
  mRNA Design a-3 (hSL-A64-N5) comprising derived and/or modified sequence from Pf(3D7)__XP_001351122.1__HsALB_Pf-CSP(19-272)_L(AAY)_Pf-CSP(310-3 27)_Linker (AAY)_Pf-CSP(346-397) (opt6)
aggagagggcgcuuggcuugcaaggacccugagcugcggcauugaagcacacccaacccaacucgacugaagucagccucacugaaccggaucugagaaucuucucucucugggcuugccagggcucuccgaaccuagcuagcauccucuucaauuccaacuagaaagcuuaccaugaaauggguuacauucauaucauuacuauuccucuuuuccucagcauacucacucuuucaagaauaccaaugcuacggcucauccucaaacacaagaguacucaacgaacucaacuaugacaacgcaggaacaaaccucuacaacgaacuugaaaugaauuacuauggaaaacaagaaaacugguacucauuaaaaaaaaacucaagauccuuaggcgaaaacgacgacggaaacaacgaagacaacgagaaacuccgaaaaccaaaacacaaaaaacuaaaacaaccagcagacggaaacccagacccaaacgcaaacccaaacguagacccaaacgcaaacccaaacguagacccaaacgcaaacccaaacguagacccaaacgcaaacccaaacgcaaacccaaacgcaaacccaaacgcaaacccaaacgcaaacccaaacgcaaacccaaacgcaaacccaaacgcaaacccaaacgcaaacccaaacgcaaacccaaacgccaacccaaacgcaaacccaaacgccaacccaaacgcaaacccaaacgcaaacccaaacgcaaauccaaacgccaacccaaacguagacccaaacgcaaacccaaacgcaaacccaaacgcaaacccaaacgcaaaccccaacgccaacccaaacgccaaccccaacgcaaauccaaacgcaaacccaaacgcaaaccccaacgcaaacccaaacgcaaacccaaacgcaaacccaaacgcuaacccaaacgcaaaccccaacgcaaauccaaacgcaaacccaaacgcaaacccaaaugcaaacccagcagcauaugaaccuucagauaaacacauaaaagaauaccuaaacaaaauccaaaacucucucgcagccuacaucaaaccaggaucagcaaacaaacccaaagacgaacuagacuacgcaaaugauaucgaaaaaaaaauaugcaaaauggaaaaaugcucgagcguauuuaacguaguaaacucaucaaucggacucauaaugguacuaucauuucuauuccucaacuaaggacuagucccuguucccagagcccacuuuuuuuucuuuuuuugaaauaaaauagccugucuuucagaucucaaaggcucuuuucagagccaccaaaaaaaaaaaaaaaaaaaaaaaaaaaaaaaaaaaaaaaaaaaaaaaaaaaaaaaaaaaaaaaaagaauu

SEQ ID NO: 9354 - RNA, 1985 nt, Artificial Sequence
  mRNA Design a-3 (hSL-A64-N5) comprising derived and/or modified sequence from Pf(3D7)__XP_001351122.1__LumSynt_L(GGS4-GGG)_Pf-CSP(19-397) (opt11)
aggagagggcgcuuggcuugcaaggacccugagcugcggcauugaagcacacccaacccaacucgacugaagucagccucacugaaccggaucugagaaucuucucucucugggcuugccagggcucuccgaaccuagcuagcauccucuucaauuccaacuagaaagcuuaccaugcaaauauacgagggcaaacucacggcugaaggccuacgcuuuggcaucgucgcaucacgguucaaucacgcacucguggacaggcucguagaaggugccaucgacgcaauaguacgccacggcgggcgcgaagaggacauaacgcuaguacgcguacccggaagcugggaaauccccguagccgcaggcgaacucgcacgcaaagaagacaucgacgccgugaucgcaauaggaguccugauccgaggcgcaacaccacacuucgacuacaucgccuccgaagucucaaaaggccuagcggaucugagccucgaacugcgcaaaccuauaacauucggcgucauaacagccgacacauuagaacaggccauagaaagagccggaaccaaacauggaaacaaaggcugggaagcggcccuaagcgccaucgaaauggcaaaccucuucaaaagccugcgcggaggaucaggcggcagcggcggcuccggaggaagcggcggcggucuuuuucaagaauaccaaugcuacggcuccucaucgaacacacgcguacucaaugaacugaacuacgacaaugcaggaaccaaccucuacaacgaacucgagaugaacuacuacggcaaacaagaaaacugguacucgcuaaagaaaaacuccagaucccugggcgaaaacgacgacggaaacaacgaagacaacgaaaaacuacgcaaaccaaaacacaagaaacuaaaacaaccagcagacggaaacccagacccaaacgcgaacccaaacgucgacccaaacgcaaacccaaacguagacccaaacgcaaacccaaacgucgaccccaacgcaaacccaaacgccaaccccaacgcaaaccccaacgcgaacccaaacgcgaaccccaacgcaaacccaaacgcaaaccccaacgcaaacccaaacgcaaacccaaacgccaacccgaaugccaacccgaacgcaaacccgaacgcaaaccccaacgcgaaccccaacgcaaacccaaaugccaaccccaacgcaaaccccaacguagacccgaacgcaaacccgaacgcaaacccgaacgcaaacccaaacgcaaacccaaacgccaaccccaacgccaacccaaacgcgaacccaaaugcaaaccccaacgccaacccgaacgccaacccaaacgcaaacccgaacgcaaaccccaacgcaaaccccaacgcaaaccccaacgcaaacccgaacgccaacccaaacgcaaacccaaacgcaaacccaaacaaaaacaaccaaggaaacgggcaaggccacaacaugcccaacgacccaaaccgaaauguagaugaaaacgcaaacgccaacagcgcggucaaaaacaacaacaacgaagaacccucggacaaacacauaaaagaauaccuaaacaaaauccagaacucccucucaacagaauggucccccugcucaguuaccugcgguaaugguauacaaguccgcauuaaaccgggaucugccaacaaaccaaaagaugagcuagacuacgccaacgacauagaaaagaaaaucugcaaaauggagaaaugcuccucagucuucaacguaguaaacagcucgauagggcucaucaugguacucuccuuuuuauuccucaacuaaggacuagucccuguucccagagcccacuuuuuuuucuuuuuuugaaauaaaauagccugucuuucagaucucaaaggcucuuuucagagccaccaaaaaaaaaaaaaaaaaaaaaaaaaaaaaaaaaaaaaaaaaaaaaaaaaaaaaaaaaaaaaaaaagaauu

SEQ ID NO: 9355 - RNA, 1847 nt, Artificial Sequence
  mRNA Design a-3 (hSL-A64-N5) comprising derived and/or modified sequence from Pf(3D7)__XP_001351122.1__HsALB_Pf-CSP(19-272)_L(PVTN)_HBsAg (opt11)
aggagagggcgcuuggcuugcaaggacccugagcugcggcauugaagcacacccaacccaacucgacugaagucagccucacugaaccggaucugagaaucuucucucucugggcuugccagggcucuccgaaccuagcuagcauccucuucaauuccaacuagaaagcuuaccaugaaaugggucaccuucaucucccuccucuuccucuucuccucugccuacucacucuuccaagaauaccaaugcuacggcuccucuuccaacacccgcguacucaacgaacucaacuaugacaaugcaggaaccaaccuauacaacgagcuagagaugaacuacuacggcaaacaagaaaacugguacucccucaagaaaaacucacgcucccuuggcgaaaaugacgacggcaacaacgaagacaacgaaaaacuucgcaaacccaaacacaagaaauuaaaacaaccagccgacggcaacccagaccccaacgccaaccccaacgucgaccccaacgccaacccuaacgucgaccccaacgcaaacccuaacgucgauccaaacgccaaccccaacgcuaaccccaacgcaaauccgaacgcaaaccccaacgccaacccuaacgccaaccccaacgccaacccaaacgccaaccccaacgcuaaccccaacgcaaacccgaacgccaaccccaacgccaaccccaacgcaaaccccaacgccaaccccaaugcaaaccccaacgccaacccaaaugccaaccccaacgucgaccccaacgcaaaccccaacgcuaacccuaacgcuaacccaaacgccaacccaaacgcuaaccccaacgccaaccccaacgccaaccccaacgcaaacccaaacgcaaacccuaacgccaacccuaacgcaaaccccaacgcgaaccccaacgcaaaccccaacgcaaaccccaacgccaaccccaacgccaacccaaacgccaauccaaacgcaaaucccccagucaccaacauggaaaacaucaccucaggcuuccucggcccccuucucguccuacaagcugguuucuuccuucuaacccgcauccucacgaucccccaaucccucgacucaugguggaccucacucaacuuucucggaggcucacccguaugccucggacaaaacucccaaucccccaccuccaaccauuccccaaccucaugcccaccaauaugccccggcuaccguuggaugugccuccgccguuucaucauauuccuuuucauacuccuccucugccucaucuuccugcucgugcuccuagacuaucaagguaugcuacccguaugcccacucauccccggcucaaccacgacaaacacuggccccugcaaaacaugcaccacacccgcacaaggaaacuccauguuccccucaugcugcugcaccaaaccaacagacggaaacuguaccugcaucccuauccccuccuccugggccuucgcaaaauaucuaugggagugggccagcguacgcuuuuccuggcuuucccuccugguccccuucguccaaugguucguaggccucuccccaaccguauggcuauccgcaaucuggaugaugugguacuggggcccaucucucuacucaauaguaucacccuucaucccacuccuccccaucuucuucugccucuggguauacaucuaaggacuagucccuguucccagagcccacuuuuuuuucuuuuuuugaaauaaaauagccugucuuucagaucucaaaggcucuuuucagagccaccaaaaaaaaaaaaaaaaaaaaaaaaaaaaaaaaaaaaaaaaaaaaaaaaaaaaaaaaaaaaaaaaagaauu

SEQ ID NO: 9356 - RNA, 1964 nt, Artificial Sequence
  mRNA Design a-3 (hSL-A64-N5) comprising derived and/or modified sequence from Pf(3D7)__XP_001351122.1__HsALB_Pf-CSP(19-272)_L(AAY)_Pf-CSP(346-3 65)_L(AAY)_PADRE_L(PVTN)_HBsAg (opt11)
aggagagggcgcuuggcuugcaaggacccugagcugcggcauugaagcacacccaacccaacucgacugaagucagccucacugaaccggaucugagaaucuucucucucugggcuugccagggcucuccgaaccuagcuagcauccucuucaauuccaacuagaaagcuuaccaugaaauggguaaccuucauaucccuucuauucuuauucucuuccgcauacucccucuuccaagaauaucagugcuacggcucauccucaaacacacgaguccucaacgaacucaacuacgacaacgccggcaccaaucucuacaacgaacucgaaaugaacuacuacggcaaacaagaaaacugguacucccuuaagaaaaacucacgcucucucggcgaaaacgacgacggcaacaacgaagacaacgaaaaauuacgcaaacccaaacacaagaaacucaaacaaccagccgacggcaacccagaccccaaugcaaacccuaacgucgaccccaacgccaacccuaacgucgacccaaacgccaacccgaacgucgaccccaacgcaaacccaaacgccaaccccaaugccaaucccaacgccaacccuaacgccaaccccaacgccaaccccaacgccaacccuaacgccaaccccaaugcaaacccaaacgccaacccaaacgcaaacccaaacgccaauccaaacgccaacccaaacgccaaccccaacgccaacccaaacgccaaucccaacgccaaccccaacguagaccccaaugcgaacccaaacgccaacccuaacgccaaccccaacgcaaacccaaacgcuaacccaaacgcaaaccccaacgcaaaccccaacgcaaacccgaacgcgaaccccaacgccaauccaaacgcaaacccuaacgcaaacccaaacgccaacccaaacgccaacccaaacgcaaacccaaacgccaauccaaacgcaaacccgaacgcaaaccccgccgcuuacaucaaacccggaucggccaacaaacccaaagacgaacuugauuacgccaacgacaucgaagcagccuacgcaaaauucguagcggccuggacccuaaaagcagcagcacccgucacaaacauggaaaacaucacaucuggcuucuuaggcccacuccuaguccuccaggccggcuucuuccuacuaacccguauacucaccauaccacaaucacucgacucaugguggaccucccuaaacuuccucggcggaucacccgucugccugggccaaaacucgcaaucccccaccucaaaucauucgcccacaucaugcccgcccaucugccccggcuaccgguggaugugccuccgcagauucauaaucuuccucuucauacuacuacuuugccuaaucuuccucuuaguccuacucgacuaccaaggcaugcuccccgucugcccccuuauacccggcuccaccaccaccaauaccggccccugcaaaaccugcacaacacccgcccaaggcaacucaauguucccguccugcuguugcaccaaaccaaccgacggaaauugcacaugcaucccaauccccucaucaugggcauucgccaaauaccucugggaaugggccuccguccguuucuccuggcucagccuacucguucccuucguccaaugguuugucggccuuucaccuacaguauggcuauccgccauauggaugaugugguacuggggacccucacucuacucaauugucucccccuucaucccauuacuccccaucuucuucugccucugggucuacauauaaggacuagucccuguucccagagcccacuuuuuuuucuuuuuuugaaauaaaauagccugucuuucagaucucaaaggcucuuuucagagccaccaaaaaaaaaaaaaaaaaaaaaaaaaaaaaaaaaaaaaaaaaaaaaaaaaaaaaaaaaaaaaaaaagaauu

SEQ ID NO: 9357 - RNA, 2183 nt, Artificial Sequence
  mRNA Design a-3 (hSL-A64-N5) comprising derived and/or modified sequence from Pf(3D7)__XP_001351122.1__HsALB_Pf-CSP(19-384)_L(PVTN)_HBsAg (opt11)
aggagagggcgcuuggcuugcaaggacccugagcugcggcauugaagcacacccaacccaacucgacugaagucagccucacugaaccggaucugagaaucuucucucucugggcuugccagggcucuccgaaccuagcuagcauccucuucaauuccaacuagaaagcuuaccaugaaaugggucaccuucauaucacuccuauuccuauuuucaagcgccuacucccucuuccaagaauaucaaugcuauggcucaagcucaaacacccgcguccucaacgagcuaaacuacgacaacgcaggaaccaaccucuacaacgaacuggaaaugaacuacuacggaaaacaagagaacugguacuccuuaaagaaaaacucccgcucccucggcgaaaacgaugacgguaacaacgaagacaaugaaaaacuccgaaaacccaaacacaagaaacuaaaacaaccagccgacggaaaccccgacccgaacgcaaaccccaacguagacccaaacgcaaacccuaauguagacccaaacgccaacccaaacgucgacccaaacgcaaacccaaacgcuaaccccaacgccaacccaaacgccaaccccaacgccaaccccaaugccaacccaaacgcgaaccccaacgcaaaccccaacgccaacccgaacgccaacccaaacgccaacccaaacgccaaccccaacgcgaacccaaacgccaacccaaacgcuaaccccaacgcaaaccccaacgccaacccuaacgucgacccaaacgccaaucccaacgccaaccccaacgcaaaccccaacgccaacccgaacgcgaaccccaacgcaaaccccaacgcaaacccaaacgccaaccccaacgccaacccaaacgccaacccgaacgccaacccaaacgcgaaucccaaugccaaccccaacgccaauccuaaugcaaacccaaacgcaaaccccaacgccaauccgaacgcaaacccgaacaaaaacaaccaagguaacggccaaggccacaacaugcccaacgaccccaaccgcaacgucgacgaaaacgcaaacgccaacuccgcaguuaaaaacaacaacaacgaagaaccaucagacaaacacauaaaagaauaccucaacaaaauccaaaacucgcucuccaccgaauggucccccuguagcguaaccugcgguaauggaauacaaguccgaaucaaaccaggcucugccaacaaacccaaagacgaacuagacuacgccaacgacauugaaaagaaaaucugcaaaauggaaaaauguagcuccgucuucaacguagucaacuccucccccguuaccaacauggagaacauaaccuccggcuuccucggcccccuucucgugcuacaggccggauucuuccuccuaaccaggauccuaaccaucccccagucacucgacuccugguggaccucacucaacuuccucggcggaucccccgucugccucggacaaaacucccaaucccccaccucaaaccacuccccaaccucuugcccgcccauaugccccgguuaccgcuggaugugccuucgccgcuucaucauauuucuauucauccuccuucucugccuaauauuccuacucguacuccucgacuaccaaggcaugcuacccgucugcccucuuauacccggauccacgacaaccaacaccggccccugcaaaaccugcaccacacccgcccaaggcaacucuauguuccccucaugcugcugcacaaaacccaccgacggcaacugcacaugcauaccaauccccucuuccugggccuuugccaaauaccuuugggaaugggcuuccguccguuuuuccugguuaucccuccuggucccauucguccaaugguucgucggccuuucaccaaccgucuggcuauccgccaucuggaugaugugguacuggggucccucccucuacagcaucgucucaccauuuaucccccuccugcccaucuucuucugcuuguggguauacauaugaggacuagucccuguucccagagcccacuuuuuuuucuuuuuuugaaauaaaauagccugucuuucagaucucaaaggcucuuuucagagccaccaaaaaaaaaaaaaaaaaaaaaaaaaaaaaaaaaaaaaaaaaaaaaaaaaaaaaaaaaaaaaaaaagaauu

SEQ ID NO: 9358 - RNA, 2000 nt, Artificial Sequence
  mRNA Design a-3 (hSL-A64-N5) comprising derived and/or modified sequence from Pf(3D7)__XP_001351122.1__HsALB_Pf-CSP(19-384)_L(SGG)_Ferritin (opt11)
aggagagggcgcuuggcuugcaaggacccugagcugcggcauugaagcacacccaacccaacucgacugaagucagccucacugaaccggaucugagaaucuucucucucugggcuugccagggcucuccgaaccuagcuagcauccucuucaauuccaacuagaaagcuuaccaugaaaugggucaccuucauaucacuacuuuuccuguucuccucagcauacucacucuuccaagaguaccaaugcuacggcucaucauccaauacccgcguacuuaacgaauuaaacuacgacaacgcaggcaccaaccucuacaacgaacucgaaaugaacuauuacggaaaacaagaaaacugguacucacuaaagaaaaacagcagaucccucggcgaaaacgacgacggcaauaacgaagacaacgaaaaacugagaaaaccuaaacacaagaaacucaaacaacccgcagacggcaaccccgaccccaacgccaacccaaacguagaccccaacgccaaccccaacgucgaccccaacgccaacccuaaugucgacccaaacgcaaacccuaacgcaaaccccaaugccaacccaaacgccaaccccaacgcaaaccccaacgcaaauccaaacgcaaaucccaacgcaaaccccaaugccaaccccaacgcaaacccaaacgccaaccccaacgcaaaccccaacgcuaacccaaacgccaacccaaacgcaaacccaaacgccaaccccaacgcuaaccccaacgucgaccccaacgccaaccccaacgcaaacccaaacgccaaccccaaugcaaacccaaacgccaaccccaacgcaaacccaaacgccaacccaaacgccaaccccaacgcaaaccccaacgcuaaccccaacgcaaaccccaaugcaaacccgaacgccaacccaaacgcaaacccaaacgccaacccaaacgccaaccccaacgccaacccaaacgccaacccaaacaaaaacaaccaagguaacggacaaggccacaacaugcccaacgauccuaaccgcaacguagacgaaaacgccaacgcaaacagcgcagucaaaaacaacaacaacgaggaaccaucagacaaacacaucaaagaauaccucaacaaaauccaaaacucccuauccacagaauggucacccugcuccguaaccugcggcaacggcauccaaguacgcaucaaacccggauccgcaaacaaaccaaaagaugaauuagauuaugcaaacgacauagaaaagaaaauaugcaaaauggaaaaaugcuccuccguauucaacguagucaacuccucuucagggggacucuccaaagacaucaucaaacuucucaacgaacaagucaacaaagagaugaacagcuccaaccucuacaugucaaugucaagcuggugcuacacacacucacuggacggcgccggccucuuccuauucgaccacgccgcagaagaauacgaacacgccaagaaacuuauaaucuuccuaaacgaaaauaacguaccuguccaacucacaucaaucucggccccagaacauaaauucgaagggcucacgcaaauauuucaaaaagcauacgaacacgaacagcacaucuccgaaucaaucaacaacauugucgaccacgcaaucaaauccaaagaccacgccacauucaacuuccuacaaugguacguggccgaacaacacgaagaagaaguccucuucaaagacauacuagacaaaaucgaacuaaucggcaacgaaaaccacggccucuaccuagccgaccaauacguaaaaggaaucgcgaaaucccgcaaauccuaaggacuagucccuguucccagagcccacuuuuuuuucuuuuuuugaaauaaaauagccugucuuucagaucucaaaggcucuuuucagagccaccaaaaaaaaaaaaaaaaaaaaaaaaaaaaaaaaaaaaaaaaaaaaaaaaaaaaaaaaaaaaaaaaagaauu

SEQ ID NO: 9359 - RNA, 1961 nt, Artificial Sequence
  mRNA Design a-3 (hSL-A64-N5) comprising derived and/or modified sequence from Pf(3D7)__XP_001351122.1__HsALB_Pf-CSP(93-384)_L(PVTN)_HBsAg (opt11)
aggagagggcgcuuggcuugcaaggacccugagcugcggcauugaagcacacccaacccaacucgacugaagucagccucacugaaccggaucugagaaucuucucucucugggcuugccagggcucuccgaaccuagcuagcauccucuucaauuccaacuagaaagcuuaccaugaaaugggucaccuuuaucucacuccuauuucucuucucuuccgcauacuccaaacucaaacaacccgcagacggaaaccccgacccaaacgcaaaccccaacguagaccccaacgccaaccccaacgucgaccccaacgccaaccccaacguagaccccaacgcaaaccccaacgccaacccaaacgccaaccccaacgccaaccccaacgccaaucccaacgccaacccaaacgcaaaucccaacgcaaaccccaacgccaaccccaacgccaacccaaacgccaauccaaacgcaaacccuaacgccaacccuaacgcgaaccccaacgccaaccccaacgcaaaccccaacgccaaccccaaugucgaccccaacgccaaccccaacgccaaccccaacgcaaaccccaacgcaaacccaaacgccaaucccaacgccaaccccaacgcaaacccuaacgccaaccccaaugccaauccuaacgccaaccccaacgccaacccuaacgccaacccaaacgccaaccccaacgccaaccccaacgccaacccuaacgccaacccuaacgccaacccaaacgccaauccaaacaagaacaaccaaggcaacggucaaggccacaauaugccaaacgacccaaaccgaaacguagacgaaaacgccaacgccaacuccgccgucaaaaacaacaacaacgaagaacccuccgacaaacacaucaaagaauaucugaacaaaauccaaaacucccucuccaccgaauggucccccugcuccgucacuuguggcaauggcauacaaguccgcaucaaacccggcucagccaacaaacccaaagacgaacucgacuacgcaaacgacaucgaaaagaaaauaugcaaaauggaaaaaugcuccucugucuucaacgucgucaacuccucgcccguaaccaacauggaaaacaucaccucaggauuccucggcccccuacucguccuccaagccggcuucuuccuccucacccgaauccuuacaaucccccaaucccuugacucaugguggaccucccuuaauuuccucggcgguucccccgucugccuuggccaaaacucacaaucccccaccucaaaccacucccccacuuccugcccgcccauaugccccggcuaccgcuggaugugccuccgccgguucaucauauuccucuucauccuacuccucugccuuauauuucuauuaguccuccuagacuaccaaggaaugcuccccguaugcccacuaauccccggauccaccaccaccaacaccggccccugcaaaaccugcaccaccccugcacaaggaaacuccauguucccaucuuguugcugcacaaaaccaaccgacggcaacuguaccugcauccccaucccuucaucaugggccuucgccaaauaccuaugggaaugggccucaguacguuucuccuggcuaucccuccucgucccauucguucaaugguucgucggccuaucccccacgguauggcucuccgcaauauggaugaugugguacuggggccccucacuauacaguauaguuucccccuucauaccccuccuccccauauucuucugccucuggguauacaucuagggacuagucccuguucccagagcccacuuuuuuuucuuuuuuugaaauaaaauagccugucuuucagaucucaaaggcucuuuucagagccaccaaaaaaaaaaaaaaaaaaaaaaaaaaaaaaaaaaaaaaaaaaaaaaaaaaaaaaaaaaaaaaaaagaauu

SEQ ID NO: 9360 - RNA, 1622 nt, Artificial Sequence
  mRNA Design a-3 (hSL-A64-N5) comprising derived and/or modified sequence from Pf(3D7)__XP_001351122.1__HsALB_Pf-CSP(199-377)_L(PVTN)_HBsAg (opt11)
aggagagggcgcuuggcuugcaaggacccugagcugcggcauugaagcacacccaacccaacucgacugaagucagccucacugaaccggaucugagaaucuucucucucugggcuugccagggcucuccgaaccuagcuagcauccucuucaauuccaacuagaaagcuuaccaugaaauggguaaccuucaucucccuccuauucuuauucucaucagccuacuccgacccaaacgcaaaccccaaugccaaccccaacgccaaccccaacgccaaucccaacgccaaccccaacgccaaucccaaugcuaaccccaacgccaacccaaacgccaacccaaacgcaaaccccaacgccaaccccaacgccaaccccaacgccaacccaaacgccaaccccaacgcaaaccccaacgccaacccaaacgccaaccccaacgccaacccaaacaaaaacaaucaaggcaacggccaaggacacaacaugcccaacgaccccaaccgcaacgucgacgaaaacgcaaacgccaacucugcagucaaaaacaacaacaacgaagaacccuccgacaaacacauaaaagaauaccucaacaaaauccaaaacucccucuccacagaaugguccccaugcuccgucacgugcggcaacggcauccaaguacgcaucaaacccggcucugccaacaaaccuaaagacgaacucgacuacgccaacgacaucgaaaagaaaaucugcaaaauggaaaaaugcuccucaguccccguaacuaacauggaaaacaucacguccggcuuccucggcccccuccuaguccuccaagccggcuucuuccuacucacacgcauucuuaccaucccgcaaucacucgacuccugguggaccucccucaacuucuuaggcggcuccccugucugccucggccaaaacucacaaucccccacuucaaaccacucacccaccagcugcccacccauaugcccaggauaccgcuggaugugccuccgccguuucauaaucuuccucuucauacuccuacucugccuaaucuuccuccucguacuccuagacuaccaaggcaugcuccccgucugcccacucauccccggaagcacuacaaccaacaccggccccugcaaaacaugcaccacccccgcacaaggcaacuccauguuccccuccugcugcugcacaaaacccacugauggcaacugcacuugcauccccauccccuccucaugggccuucgccaaauaucucugggaaugggccagcguccgguucucuuggcucucacuccuaguccccuucguucaaugguucguaggccuaucccccaccgucuggcucuccgcaauauggaugaugugguauuggggccccucccucuacuccauuguaucccccuucaucccacuacuccccaucuucuucugccuuugggucuacauauaaggacuagucccuguucccagagcccacuuuuuuuucuuuuuuugaaauaaaauagccugucuuucagaucucaaaggcucuuuucagagccaccaaaaaaaaaaaaaaaaaaaaaaaaaaaaaaaaaaaaaaaaaaaaaaaaaaaaaaaaaaaaaaaaagaauu

SEQ ID NO: 9361 - RNA, 1319 nt, Artificial Sequence
  mRNA Design a-3 (hSL-A64-N5) comprising derived and/or modified sequence from Pf(3D7)__XP_001351122.1__HsALB_Pf-CSP(19-272)_L(AAY)_Pf-CSP(346-3 75)_L(AAY)_Pf-CSP(310-327) (opt11)
aggagagggcgcuuggcuugcaaggacccugagcugcggcauugaagcacacccaacccaacucgacugaagucagccucacugaaccggaucugagaaucuucucucucugggcuugccagggcucuccgaaccuagcuagcauccucuucaauuccaacuagaaagcuuaccaugaaauggguaaccuucaucucacuccuauuccuguucuccagugcauacucacucuuccaagaauaccaaugcuacggcuccagcagcaacacgcgaguccucaacgaacuaaacuacgauaacgccggaaccaaccuuuacaacgaacucgaaaugaacuacuacggcaaacaagaaaacugguacucacuaaaaaaaaacagcagaucacuaggcgaaaacgacgacggaaacaacgaagacaacgaaaaacuacgcaagcccaaacacaagaaacucaaacaacccgcagacggaaacccagaccccaacgcaaaccccaacguagaccccaacgcaaaccccaacguagaccccaacgcaaaucccaacguagacccaaacgcaaaccccaacgcaaacccaaacgcaaacccaaacgcgaacccaaacgcaaacccaaacgcaaacccgaacgccaacccaaacgcaaacccaaacgcuaaccccaacgcaaacccaaacgcaaacccaaacgcaaacccaaacgcaaacccaaacgcaaacccaaacgcaaacccgaacgcaaacccaaacgcaaaccccaacguagacccaaacgccaacccaaacgcaaaccccaacgccaacccaaacgcaaacccaaacgcaaacccaaacgcaaacccaaacgcaaacccaaacgcaaacccaaacgcaaaccccaacgcgaacccaaacgccaacccaaacgcaaacccaaacgcgaacccaaacgccaaccccaacgcaaaccccaacgcaaaccccaacgcaaacccaaacgcaaaccccgccgcuuacauaaaacccggcucggccaauaaaccaaaagacgaacucgacuacgccaacgacauagaaaaaaaaauaugcaaaauggaaaaaugcagcgccgccuacgaaccaucagacaaacacaucaaagaauaccucaacaaaauacaaaacagccucuaaggacuagucccuguucccagagcccacuuuuuuuucuuuuuuugaaauaaaauagccugucuuucagaucucaaaggcucuuuucagagccaccaaaaaaaaaaaaaaaaaaaaaaaaaaaaaaaaaaaaaaaaaaaaaaaaaaaaaaaaaaaaaaaaagaauu

SEQ ID NO: 9362 - RNA, 1367 nt, Artificial Sequence
  mRNA Design a-3 (hSL-A64-N5) comprising derived and/or modified sequence from Pf(3D7)__XP_001351122.1__HsALB_Pf-CSP(19-272)_L(AAY)_Pf-CSP(346-3 75)_L(AAY)_Pf-CSP(310-327)_L(AAY)_PADRE (opt11)
aggagagggcgcuuggcuugcaaggacccugagcugcggcauugaagcacacccaacccaacucgacugaagucagccucacugaaccggaucugagaaucuucucucucugggcuugccagggcucuccgaaccuagcuagcauccucuucaauuccaacuagaaagcuuaccaugaaauggguaacauuuaucucccuccucuuccucuuuuccuccgcauacucacucuuccaagaauaccaaugcuacggaucaagcuccaacacccgcguccuuaacgaacuuaacuacgacaacgccggcaccaacuuauacaacgaacucgagaugaacuacuacggcaaacaagaaaacugguacucccucaaaaaaaacuccagaucccucggcgaaaacgacgacggaaacaacgaagacaacgaaaaacuccgcaaacccaaacacaaaaaacucaaacaacccgcugacggcaacccugaccccaacgccaaccccaacguagaccccaacgccaaucccaacguagacccaaacgccaaccccaacguagaccccaacgccaaccccaacgcaaacccaaacgccaaccccaacgccaaccccaacgcgaacccaaacgccaaccccaacgccaacccuaacgccaacccgaacgccaaccccaacgccaaccccaacgccaaccccaacgcgaaccccaacgcaaaccccaacgccaaccccaacgcaaaccccaacgccaaccccaacgccaaccccaacguagaccccaacgccaacccaaacgccaacccaaacgcaaaccccaacgccaauccaaacgcaaaccccaacgcaaaccccaaugccaacccaaacgccaaccccaacgccaacccaaacgccaacccaaacgccaaccccaacgcaaacccaaacgcaaaccccaacgcaaacccuaacgccaacccaaacgccaacccaaacgcaaaccccaacgcaaaccccgccgccuacaucaaaccaggcuccgccaauaaaccaaaagacgaacucgacuacgcaaaugacauagaaaaaaaaauaugcaaaauggaaaaaugcuccgcagccuacgaacccagcgacaaacauaucaaagaauacuuaaacaaaauccaaaacucccuagccgccuacgccaaauucgucgcagccuggacccucaaagccgccgccuaaggacuagucccuguucccagagcccacuuuuuuuucuuuuuuugaaauaaaauagccugucuuucagaucucaaaggcucuuuucagagccaccaaaaaaaaaaaaaaaaaaaaaaaaaaaaaaaaaaaaaaaaaaaaaaaaaaaaaaaaaaaaaaaaagaauu

SEQ ID NO: 9363 - RNA, 1367 nt, Artificial Sequence
  mRNA Design a-3 (hSL-A64-N5) comprising derived and/or modified sequence from Pf(3D7)__XP_001351122.1__HsALB_Pf-CSP(19-272)_L(AAY)_Pf-CSP(310-3 27)_L(AAY)_Pf-CSP(346-375)_L(AAY)_PADRE (opt11)
aggagagggcgcuuggcuugcaaggacccugagcugcggcauugaagcacacccaacccaacucgacugaagucagccucacugaaccggaucugagaaucuucucucucugggcuugccagggcucuccgaaccuagcuagcauccucuucaauuccaacuagaaagcuuaccaugaaaugggugaccuuuaucucacuccucuuccucuucucaagcgcauacucacucuuccaagaauaccaaugcuacgguucaagcucaaacacaagaguccucaacgaacucaacuacgacaacgccggaaccaaccucuacaacgaacucgaaaugaacuacuacggcaaacaagaaaacugguacucacucaaaaaaaacagcaggucccuaggcgaaaacgacgacggaaacaacgaagacaacgaaaaacuccgcaaaccaaaacacaaaaaacugaaacaacccgcagacggaaacccagaccccaacgcaaacccgaacgucgacccgaacgccaacccaaacguagacccaaacgcaaaccccaacgucgacccaaacgcaaacccaaacgcaaacccaaacgcaaacccgaacgcaaacccaaacgcgaacccaaacgcaaacccaaacgcaaacccaaacgccaacccaaacgcaaacccaaaugcaaaccccaacgcaaacccgaacgcaaacccaaacgcaaaccccaacgcaaacccaaacgcuaacccaaacgcgaaccccaacgcaaacccaaacguggacccaaacgcaaacccaaacgcaaacccaaacgcgaacccgaacgcaaacccaaacgcgaacccaaacgcaaaccccaacgcaaacccaaacgcaaacccaaacgccaacccaaacgcaaacccaaacgcgaaccccaacgccaacccaaacgcaaacccaaacgcaaacccaaacgcaaacccaaacgcaaacccaaacgccaacccaaacgcaaacccagcugccuacgaacccuccgacaaacacaucaaagaguaccugaacaaaauccaaaacucccucgcagccuacaucaagcccggauccgcaaacaaacccaaagacgaacucgacuacgccaacgacauagaaaaaaaaaucugcaaaauggaaaaaugcucagccgcauacgcaaaauucguagcagccuggacccuaaaagcggcagcauaaggacuagucccuguucccagagcccacuuuuuuuucuuuuuuugaaauaaaauagccugucuuucagaucucaaaggcucuuuucagagccaccaaaaaaaaaaaaaaaaaaaaaaaaaaaaaaaaaaaaaaaaaaaaaaaaaaaaaaaaaaaaaaaaagaauu

SEQ ID NO: 9364 - RNA, 1421 nt, Artificial Sequence
  mRNA Design a-3 (hSL-A64-N5) comprising derived and/or modified sequence from Pf(3D7)__XP_001351122.1__HsALB_Pf-CSP(19-272)_L(AAY)_Pf-CSP(310-3 27)_L(AAY)_Pf-CSP(346-375)_L(AAY)_PADRE_L(AAY)_P2 (opt11)
aggagagggcgcuuggcuugcaaggacccugagcugcggcauugaagcacacccaacccaacucgacugaagucagccucacugaaccggaucugagaaucuucucucucugggcuugccagggcucuccgaaccuagcuagcauccucuucaauuccaacuagaaagcuuaccaugaaaugggugaccuucauaucacuauuauuccucuucucaagcgcauacucacucuuccaagaauaccaaugcuacggcuccuccucaaacacgcgcguacucaacgaacuaaacuacgacaacgccggaacaaaccucuacaacgaacuagaaaugaacuacuacggcaaacaagaaaacugguacucccuaaaaaaaaacucaagaucccuaggcgagaaugacgacggcaacaacgaagacaacgaaaaacuccgcaaacccaaacacaaaaaacucaaacaacccgccgacggaaacccagacccaaacgccaacccaaacgucgacccaaacgcaaaccccaacguagaccccaacgcaaacccaaacguagacccaaacgcaaacccaaacgcaaacccaaacgcaaaccccaacgccaacccaaacgcaaacccaaacgccaauccaaacgcaaacccaaaugccaacccaaacgcaaacccaaacgcaaacccaaacgccaaccccaacgcaaacccaaacgcaaacccaaacgccaacccaaacgcaaacccaaacgcaaaccccaacgccaacccgaacguagaccccaacgcaaaccccaacgcaaacccaaacgccaauccaaacgcaaaccccaacgcaaaccccaacgcaaaccccaacgccaauccaaacgccaaccccaacgcgaacccgaacgcaaacccaaacgcaaacccaaacgcaaacccaaacgcaaacccaaacgcaaacccaaacgcaaacccgaacgcaaaccccaacgccaacccaaacgcaaacccagccgcauacgaacccucagacaaacacauaaaagaauaccuaaacaaaauccaaaacucacucgcugccuacaucaaaccaggaagcgcaaacaaacccaaagacgaacucgauuacgccaacgacaucgaaaaaaaaaucugcaaaauggaaaaaugcuccgccgccuacgcaaaauucgucgcagccuggacucuaaaagccgccgcagccgcauaccaauacauaaaagccaacucaaaauucaucggaaucaccgaacuguaaggacuagucccuguucccagagcccacuuuuuuuucuuuuuuugaaauaaaauagccugucuuucagaucucaaaggcucuuuucagagccaccaaaaaaaaaaaaaaaaaaaaaaaaaaaaaaaaaaaaaaaaaaaaaaaaaaaaaaaaaaaaaaaaagaauu

SEQ ID NO: 9365 - RNA, 1385 nt, Artificial Sequence
  mRNA Design a-3 (hSL-A64-N5) comprising derived and/or modified sequence from Pf(3D7)__XP_001351122.1__HsALB_Pf-CSP(19-272)_L(AAY)_Pf-CSP(310-3 27)_Linker (AAY)_Pf-CSP(346-397) (opt11)
aggagagggcgcuuggcuugcaaggacccugagcugcggcauugaagcacacccaacccaacucgacugaagucagccucacugaaccggaucugagaaucuucucucucugggcuugccagggcucuccgaaccuagcuagcauccucuucaauuccaacuagaaagcuuaccaugaaaugggucaccuucaucucacuccuguuccuauucucgagcgcauacucccucuuccaagaauaccagugcuacggcucaagcucaaacacacgcguacucaacgaacuaaacuacgacaacgccggaaccaaccucuacaacgaacuagaaaugaacuacuacggcaaacaagagaacugguacucucuaaagaaaaacagcagaucccugggcgagaacgacgacggaaacaacgaagacaacgagaaacuacgcaaacccaaacacaagaaacuaaaacaacccgcagauggaaacccagauccaaacgcaaacccaaacgucgacccuaacgcaaaccccaacguagaccccaacgcaaaccccaacguagacccaaacgccaacccaaacgccaacccaaacgccaacccgaacgcaaaccccaaugccaacccaaacgccaacccgaacgccaacccaaacgcgaaccccaacgccaacccaaacgcaaacccaaacgcaaacccuaacgcaaaccccaacgccaacccaaaugccaacccaaacgcaaacccaaacgcaaacccaaacgccaaccccaacguagacccaaacgcaaaccccaacgcaaacccaaacgcaaacccaaacgccaacccaaacgcaaacccaaacgcaaacccaaacgcaaacccgaacgccaaccccaacgcaaacccaaacgcaaacccaaacgccaacccaaacgccaacccaaacgcaaaccccaacgcaaaccccaacgccaaccccaacgccaacccaaacgcaaacccaaacgcaaacccagccgcauacgaacccucagacaaacacauaaaagaauaccucaauaaaauccaaaacucacuugcagccuacauaaaaccaggcagcgcgaacaaacccaaagacgaacucgacuacgcgaacgacauagaaaagaaaaucugcaaaauggaaaaaugcucauccgucuucaaugucguaaacucauccauaggccuaaucaugguccucuccuuccuauuccucaacuaaggacuagucccuguucccagagcccacuuuuuuuucuuuuuuugaaauaaaauagccugucuuucagaucucaaaggcucuuuucagagccaccaaaaaaaaaaaaaaaaaaaaaaaaaaaaaaaaaaaaaaaaaaaaaaaaaaaaaaaaaaaaaaaaagaauu

SEQ ID NO: 9366 - RNA, 1829 nt, Artificial Sequence
  mRNA Design i-3 (hSL-A64-N5) comprising derived and/or modified sequence from Pf(3D7)__XP_001351122.1__LumSynt_L(GGS4-GGG)_Pf-CSP(19-397) (opt1)
aggagaaagcuuaccaugcagaucuacgagggcaagcugaccgccgaggggcuccgcuucggcaucguggccagccgguucaaccacgcgcuggucgaccgccugguggagggggccaucgacgccaucgugcggcacggcgggcgcgaggaggacaucacccucguccgggugcccggcuccugggagaucccgguggccgccggcgagcuggcccgcaaggaggacaucgacgcggucaucgccaucggggugcugauccggggcgccacgccccacuucgacuacaucgccagcgagguguccaaggggcucgcggaccugagccuggagcuccgcaagcccaucaccuucggcgucaucaccgccgacacccuggagcaggccaucgagcgggccgggacgaagcacggcaacaagggcugggaggccgcgcuguccgccaucgagauggccaaccucuucaagagccugcgcggcgggagcggcggguccggcgggagcggcggcuccgggggcgggcuguuccaggaguaccagugcuacggcuccagcuccaacacccgggugcucaacgagcugaacuacgacaacgcggggaccaaccuguacaacgagcucgagaugaacuacuacggcaagcaggagaacugguacagccugaagaagaacucccgcagccugggggagaacgacgacggcaacaacgaggacaacgagaagcuccggaagcccaagcacaagaagcugaagcagccggccgacgggaaccccgaccccaacgccaaccccaacguggacccgaacgccaaccccaacgucgaccccaacgccaaccccaacguggacccgaacgcgaaccccaacgccaaccccaacgccaaccccaacgccaacccgaacgcgaaccccaacgccaaccccaacgccaaccccaacgccaacccgaacgccaaccccaacgcgaaccccaacgccaaccccaacgccaacccgaacgccaaccccaacgccaaccccaacgcgaaccccaacgccaacccgaacgccaaccccaacguggaccccaacgccaaccccaacgccaacccgaacgcgaaccccaacgccaaccccaacgccaacccgaacgccaaccccaacgccaaccccaacgcgaaccccaacgccaacccgaacgccaaccccaacgccaaccccaacgcgaaccccaacgccaacccgaacgccaaccccaacgccaaccccaacgccaaccccaacgcgaacccgaacgccaaccccaacaagaacaaccagggcaacggccaggggcacaacaugcccaacgaccccaaccgcaacgucgacgagaacgccaacgccaacuccgccgugaagaacaacaacaacgaggagccgagcgacaagcacaucaaggaguaccugaacaagauccagaacucccucagcacggaguggucccccugcagcgugaccugcggcaacgggauccagguccggaucaagcccggcuccgcgaacaagcccaaggacgagcuggacuacgccaacgacaucgagaagaagaucugcaagauggagaagugcagcuccguguucaacguggucaacagcuccaucgggcugaucauggugcucagcuuccuguuccugaacugaggacuaguuauaagacugacuagcccgaugggccucccaacgggcccuccuccccuccuugcaccgagauuaaucaaaggcucuuuucagagccaccaaaaaaaaaaaaaaaaaaaaaaaaaaaaaaaaaaaaaaaaaaaaaaaaaaaaaaaaaaaaaaaaagaauu

SEQ ID NO: 9367 - RNA, 1376 nt, Artificial Sequence
  mRNA Design i-3 (hSL-A64-N5) comprising derived and/or modified sequence from Pf(3D7)__XP_001351122.1__HsALB_Pf-CSP(19-397) (opt1)
aggagaaagcuuaccaugaagugggugaccuucaucagccuccuguuccuguucuccagcgccuacucccuguuccaggaguaccagugcuacggcuccagcuccaacacccgggugcucaacgagcugaacuacgacaacgcggggaccaaccuguacaacgagcucgagaugaacuacuacggcaagcaggagaacugguacagccugaagaagaacucccgcagccugggggagaacgacgacggcaacaacgaggacaacgagaagcuccggaagcccaagcacaagaagcugaagcagccggccgacgggaaccccgaccccaacgccaaccccaacguggacccgaacgccaaccccaacgucgaccccaacgccaaccccaacguggacccgaacgcgaaccccaacgccaaccccaacgccaaccccaacgccaacccgaacgcgaaccccaacgccaaccccaacgccaaccccaacgccaacccgaacgccaaccccaacgcgaaccccaacgccaaccccaacgccaacccgaacgccaaccccaacgccaaccccaacgcgaaccccaacgccaacccgaacgccaaccccaacguggaccccaacgccaaccccaacgccaacccgaacgcgaaccccaacgccaaccccaacgccaacccgaacgccaaccccaacgccaaccccaacgcgaaccccaacgccaacccgaacgccaaccccaacgccaaccccaacgcgaaccccaacgccaacccgaacgccaaccccaacgccaaccccaacgccaaccccaacgcgaacccgaacgccaaccccaacaagaacaaccagggcaacggccaggggcacaacaugcccaacgaccccaaccgcaacgucgacgagaacgccaacgccaacuccgccgugaagaacaacaacaacgaggagccgagcgacaagcacaucaaggaguaccugaacaagauccagaacucccucagcacggaguggucccccugcagcgugaccugcggcaacgggauccagguccggaucaagcccggcuccgcgaacaagcccaaggacgagcuggacuacgccaacgacaucgagaagaagaucugcaagauggagaagugcagcuccguguucaacguggucaacagcuccaucgggcugaucauggugcucagcuuccuguuccugaacugaggacuaguuauaagacugacuagcccgaugggccucccaacgggcccuccuccccuccuugcaccgagauuaaucaaaggcucuuuucagagccaccaaaaaaaaaaaaaaaaaaaaaaaaaaaaaaaaaaaaaaaaaaaaaaaaaaaaaaaaaaaaaaaaagaauu

SEQ ID NO: 9368 - RNA, 1691 nt, Artificial Sequence
  mRNA Design i-3 (hSL-A64-N5) comprising derived and/or modified sequence from Pf(3D7)__XP_001351122.1__HsALB_Pf-CSP(19-272)_L(PVTN)_HBsAg (opt1)
aggagaaagcuuaccaugaagugggugaccuucaucagccugcucuuccuguucuccagcgccuacucccuguuccaggaguaccagugcuacggcuccagcuccaacacccgggugcucaacgagcugaacuacgacaacgcggggaccaaccuguacaacgagcucgagaugaacuacuacggcaagcaggagaacugguacagccugaagaagaacucccgcagccugggggagaacgacgacggcaacaacgaggacaacgagaagcuccggaagcccaagcacaagaagcugaagcagccggccgacgggaaccccgaccccaacgccaaccccaacguggacccgaacgccaaccccaacgucgaccccaacgccaaccccaacguggacccgaacgcgaaccccaacgccaaccccaacgccaaccccaacgccaacccgaacgcgaaccccaacgccaaccccaacgccaaccccaacgccaacccgaacgccaaccccaacgcgaaccccaacgccaaccccaacgccaacccgaacgccaaccccaacgccaaccccaacgcgaaccccaacgccaacccgaacgccaaccccaacguggaccccaacgccaaccccaacgccaacccgaacgcgaaccccaacgccaaccccaacgccaacccgaacgccaaccccaacgccaaccccaacgcgaaccccaacgccaacccgaacgccaaccccaacgccaaccccaacgcgaaccccaacgccaacccgaacgccaaccccaacgccaaccccaacgccaaccccaacgcgaacccgaacgccaaccccccggugacgaacauggagaacaucaccagcggcuuccuggggccccuccuggugcugcaggccggcuucuuccuccugacccgcauccugaccaucccgcagucccucgacagcugguggaccucccugaacuuccucgggggcagccccgucugccuggggcagaacucccagagccccaccuccaaccacagccccaccuccugcccgcccaucugccccggcuaccgguggaugugccugcgccgguucaucaucuuccuguucauccuccugcugugccucaucuuccugcuggugcuccuggacuaccagggcaugcugcccgugugcccgcucauccccgggagcacgaccaccaacaccggccccugcaagacgugcaccacccccgcccaggggaacuccauguucccgagcugcugcugcaccaagcccacggacggcaacugcacgugcauccccauccccuccagcugggcguucgccaaguaccugugggagugggccuccguccgcuucagcuggcugucccuccuggugccguucgugcagugguucgucgggcugagccccaccguguggcucuccgccaucuggaugaugugguacuggggccccagccuguacagcaucgugucccccuucaucccgcugcuccccaucuucuucugccugugggucuacaucugaggacuaguuauaagacugacuagcccgaugggccucccaacgggcccuccuccccuccuugcaccgagauuaaucaaaggcucuuuucagagccaccaaaaaaaaaaaaaaaaaaaaaaaaaaaaaaaaaaaaaaaaaaaaaaaaaaaaaaaaaaaaaaaaagaauu

SEQ ID NO: 9369 - RNA, 1808 nt, Artificial Sequence
  mRNA Design i-3 (hSL-A64-N5) comprising derived and/or modified sequence from Pf(3D7)__XP_001351122.1__HsALB_Pf-CSP(19-272)_L(AAY)_Pf-CSP(346-3 65)_L(AAY)_PADRE_L(PVTN)_HBsAg (opt1)
aggagaaagcuuaccaugaagugggugaccuucaucagccugcucuuccuguucuccagcgccuacucccuguuccaggaguaccagugcuacggcuccagcuccaacacccgggugcucaacgagcugaacuacgacaacgcggggaccaaccuguacaacgagcucgagaugaacuacuacggcaagcaggagaacugguacagccugaagaagaacucccgcagccugggggagaacgacgacggcaacaacgaggacaacgagaagcuccggaagcccaagcacaagaagcugaagcagccggccgacgggaaccccgaccccaacgccaaccccaacguggacccgaacgccaaccccaacgucgaccccaacgccaaccccaacguggacccgaacgcgaaccccaacgccaaccccaacgccaaccccaacgccaacccgaacgcgaaccccaacgccaaccccaacgccaaccccaacgccaacccgaacgccaaccccaacgcgaaccccaacgccaaccccaacgccaacccgaacgccaaccccaacgccaaccccaacgcgaaccccaacgccaacccgaacgccaaccccaacguggaccccaacgccaaccccaacgccaacccgaacgcgaaccccaacgccaaccccaacgccaacccgaacgccaaccccaacgccaaccccaacgcgaaccccaacgccaacccgaacgccaaccccaacgccaaccccaacgcgaaccccaacgccaacccgaacgccaaccccaacgccaaccccaacgccaaccccaacgcgaacccgaacgccaaccccgccgcguauaucaagcccggcuccgcgaacaagcccaaggacgagcuggacuacgccaacgacaucgaggcggccuacgccaaguucguggccgccuggacccugaaggcggccgccccggugacgaacauggagaacaucaccagcggcuuccuggggccccuccuggugcugcaggccggcuucuuccuccugacccgcauccugaccaucccgcagucccucgacagcugguggaccucccugaacuuccucgggggcagccccgucugccuggggcagaacucccagagccccaccuccaaccacagccccaccuccugcccgcccaucugccccggcuaccgguggaugugccugcgccgguucaucaucuuccuguucauccuccugcugugccucaucuuccugcuggugcuccuggacuaccagggcaugcugcccgugugcccgcucauccccgggagcacgaccaccaacaccggccccugcaagacgugcaccacccccgcccaggggaacuccauguucccgagcugcugcugcaccaagcccacggacggcaacugcacgugcauccccauccccuccagcugggcguucgccaaguaccugugggagugggccuccguccgcuucagcuggcugucccuccuggugccguucgugcagugguucgucgggcugagccccaccguguggcucuccgccaucuggaugaugugguacuggggccccagccuguacagcaucgugucccccuucaucccgcugcuccccaucuucuucugccugugggucuacaucugaggacuaguuauaagacugacuagcccgaugggccucccaacgggcccuccuccccuccuugcaccgagauuaaucaaaggcucuuuucagagccaccaaaaaaaaaaaaaaaaaaaaaaaaaaaaaaaaaaaaaaaaaaaaaaaaaaaaaaaaaaaaaaaaagaauu

SEQ ID NO: 9370 - RNA, 1808 nt, Artificial Sequence
  mRNA Design i-3 (hSL-A64-N5) comprising derived and/or modified sequence from Pf(3D7)__XP_001351122.1__HsALB_Pf-CSP(19-272)_L(AAY)_Pf-CSP(346-3 65)_L(AAY)_PADRE_L(PVTN)_HBsAg (opt1)
aggagaaagcuuaccaugaagugggugaccuucaucagccuccuguuccuguucuccagcgccuacucccuguuccaggaguaccagugcuacggcuccagcuccaacacccgggugcucaacgagcugaacuacgacaacgcggggaccaaccuguacaacgagcucgagaugaacuacuacggcaagcaggagaacugguacagccugaagaagaacucccgcagccugggggagaacgacgacggcaacaacgaggacaacgagaagcuccggaagcccaagcacaagaagcugaagcagccggccgacgggaaccccgaccccaacgccaaccccaacguggacccgaacgccaaccccaacgucgaccccaacgccaaccccaacguggacccgaacgcgaaccccaacgccaaccccaacgccaaccccaacgccaacccgaacgcgaaccccaacgccaaccccaacgccaaccccaacgccaacccgaacgccaaccccaacgcgaaccccaacgccaaccccaacgccaacccgaacgccaaccccaacgccaaccccaacgcgaaccccaacgccaacccgaacgccaaccccaacguggaccccaacgccaaccccaacgccaacccgaacgcgaaccccaacgccaaccccaacgccaacccgaacgccaaccccaacgccaaccccaacgcgaaccccaacgccaacccgaacgccaaccccaacgccaaccccaacgcgaaccccaacgccaacccgaacgccaaccccaacgccaaccccaacgccaaccccaacgcgaacccgaacgccaaccccgccgcguauaucaagcccggcuccgcgaacaagcccaaggacgagcuggacuacgccaacgacaucgaggcggccuacgccaaguucguggccgccuggacccugaaggcggccgccccggugacgaacauggagaacaucaccagcggcuuccuggggccccuccuggugcugcaggccggcuucuuccuccugacccgcauccugaccaucccgcagucccucgacagcugguggaccucccugaacuuccucgggggcagccccgucugccuggggcagaacucccagagccccaccuccaaccacagccccaccuccugcccgcccaucugccccggcuaccgguggaugugccugcgccgguucaucaucuuccuguucauccuccugcugugccucaucuuccugcuggugcuccuggacuaccagggcaugcugcccgugugcccgcucauccccgggagcacgaccaccaacaccggccccugcaagacgugcaccacccccgcccaggggaacuccauguucccgagcugcugcugcaccaagcccacggacggcaacugcacgugcauccccauccccuccagcugggcguucgccaaguaccugugggagugggccuccguccgcuucagcuggcugucccuccuggugccguucgugcagugguucgucgggcugagccccaccguguggcucuccgccaucuggaugaugugguacuggggccccagccuguacagcaucgugucccccuucaucccgcugcuccccaucuucuucugccugugggucuacaucugaggacuaguuauaagacugacuagcccgaugggccucccaacgggcccuccuccccuccuugcaccgagauuaaucaaaggcucuuuucagagccaccaaaaaaaaaaaaaaaaaaaaaaaaaaaaaaaaaaaaaaaaaaaaaaaaaaaaaaaaaaaaaaaaagaauu

SEQ ID NO: 9371 - RNA, 2027 nt, Artificial Sequence
  mRNA Design i-3 (hSL-A64-N5) comprising derived and/or modified sequence from Pf(3D7)__XP_001351122.1__HsALB_Pf-CSP(19-384)_L(PVTN)_HBsAg (opt1)
aggagaaagcuuaccaugaagugggugaccuucaucagccugcucuuccuguucuccagcgccuacucccuguuccaggaguaccagugcuacggcuccagcuccaacacccgggugcucaacgagcugaacuacgacaacgcggggaccaaccuguacaacgagcucgagaugaacuacuacggcaagcaggagaacugguacagccugaagaagaacucccgcagccugggggagaacgacgacggcaacaacgaggacaacgagaagcuccggaagcccaagcacaagaagcugaagcagccggccgacgggaaccccgaccccaacgccaaccccaacguggacccgaacgccaaccccaacgucgaccccaacgccaaccccaacguggacccgaacgcgaaccccaacgccaaccccaacgccaaccccaacgccaacccgaacgcgaaccccaacgccaaccccaacgccaaccccaacgccaacccgaacgccaaccccaacgcgaaccccaacgccaaccccaacgccaacccgaacgccaaccccaacgccaaccccaacgcgaaccccaacgccaacccgaacgccaaccccaacguggaccccaacgccaaccccaacgccaacccgaacgcgaaccccaacgccaaccccaacgccaacccgaacgccaaccccaacgccaaccccaacgcgaaccccaacgccaacccgaacgccaaccccaacgccaaccccaacgcgaaccccaacgccaacccgaacgccaaccccaacgccaaccccaacgccaaccccaacgcgaacccgaacgccaaccccaacaagaacaaccagggcaacggccaggggcacaacaugcccaacgaccccaaccgcaacgucgacgagaacgccaacgccaacuccgccgugaagaacaacaacaacgaggagccgagcgacaagcacaucaaggaguaccugaacaagauccagaacucccucagcacggaguggucccccugcagcgugaccugcggcaacgggauccagguccggaucaagcccggcuccgcgaacaagcccaaggacgagcuggacuacgccaacgacaucgagaagaagaucugcaagauggagaagugcagcuccguguucaacguggucaacagcuccccggugacgaacauggagaacaucaccagcggcuuccuggggccccuccuggugcugcaggccggcuucuuccuccugacccgcauccugaccaucccgcagucccucgacagcugguggaccucccugaacuuccucgggggcagccccgucugccuggggcagaacucccagagccccaccuccaaccacagccccaccuccugcccgcccaucugccccggcuaccgguggaugugccugcgccgguucaucaucuuccuguucauccuccugcugugccucaucuuccugcuggugcuccuggacuaccagggcaugcugcccgugugcccgcucauccccgggagcacgaccaccaacaccggccccugcaagacgugcaccacccccgcccaggggaacuccauguucccgagcugcugcugcaccaagcccacggacggcaacugcacgugcauccccauccccuccagcugggcguucgccaaguaccugugggagugggccuccguccgcuucagcuggcugucccuccuggugccguucgugcagugguucgucgggcugagccccaccguguggcucuccgccaucuggaugaugugguacuggggccccagccuguacagcaucgugucccccuucaucccgcugcuccccaucuucuucugccugugggucuacaucugaggacuaguuauaagacugacuagcccgaugggccucccaacgggcccuccuccccuccuugcaccgagauuaaucaaaggcucuuuucagagccaccaaaaaaaaaaaaaaaaaaaaaaaaaaaaaaaaaaaaaaaaaaaaaaaaaaaaaaaaaaaaaaaaagaauu

SEQ ID NO: 9372 - RNA, 2027 nt, Artificial Sequence
  mRNA Design i-3 (hSL-A64-N5) comprising derived and/or modified sequence from Pf(3D7)__XP_001351122.1__HsALB_Pf-CSP(19-384)_L(PVTN)_HBsAg (opt1)
aggagaaagcuuaccaugaagugggugaccuucaucagccuccuguuccuguucuccagcgccuacucccuguuccaggaguaccagugcuacggcuccagcuccaacacccgggugcucaacgagcugaacuacgacaacgcggggaccaaccuguacaacgagcucgagaugaacuacuacggcaagcaggagaacugguacagccugaagaagaacucccgcagccugggggagaacgacgacggcaacaacgaggacaacgagaagcuccggaagcccaagcacaagaagcugaagcagccggccgacgggaaccccgaccccaacgccaaccccaacguggacccgaacgccaaccccaacgucgaccccaacgccaaccccaacguggacccgaacgcgaaccccaacgccaaccccaacgccaaccccaacgccaacccgaacgcgaaccccaacgccaaccccaacgccaaccccaacgccaacccgaacgccaaccccaacgcgaaccccaacgccaaccccaacgccaacccgaacgccaaccccaacgccaaccccaacgcgaaccccaacgccaacccgaacgccaaccccaacguggaccccaacgccaaccccaacgccaacccgaacgcgaaccccaacgccaaccccaacgccaacccgaacgccaaccccaacgccaaccccaacgcgaaccccaacgccaacccgaacgccaaccccaacgccaaccccaacgcgaaccccaacgccaacccgaacgccaaccccaacgccaaccccaacgccaaccccaacgcgaacccgaacgccaaccccaacaagaacaaccagggcaacggccaggggcacaacaugcccaacgaccccaaccgcaacgucgacgagaacgccaacgccaacuccgccgugaagaacaacaacaacgaggagccgagcgacaagcacaucaaggaguaccugaacaagauccagaacucccucagcacggaguggucccccugcagcgugaccugcggcaacgggauccagguccggaucaagcccggcuccgcgaacaagcccaaggacgagcuggacuacgccaacgacaucgagaagaagaucugcaagauggagaagugcagcuccguguucaacguggucaacagcuccccggugacgaacauggagaacaucaccagcggcuuccuggggccccuccuggugcugcaggccggcuucuuccuccugacccgcauccugaccaucccgcagucccucgacagcugguggaccucccugaacuuccucgggggcagccccgucugccuggggcagaacucccagagccccaccuccaaccacagccccaccuccugcccgcccaucugccccggcuaccgguggaugugccugcgccgguucaucaucuuccuguucauccuccugcugugccucaucuuccugcuggugcuccuggacuaccagggcaugcugcccgugugcccgcucauccccgggagcacgaccaccaacaccggccccugcaagacgugcaccacccccgcccaggggaacuccauguucccgagcugcugcugcaccaagcccacggacggcaacugcacgugcauccccauccccuccagcugggcguucgccaaguaccugugggagugggccuccguccgcuucagcuggcugucccuccuggugccguucgugcagugguucgucgggcugagccccaccguguggcucuccgccaucuggaugaugugguacuggggccccagccuguacagcaucgugucccccuucaucccgcugcuccccaucuucuucugccugugggucuacaucugaggacuaguuauaagacugacuagcccgaugggccucccaacgggcccuccuccccuccuugcaccgagauuaaucaaaggcucuuuucagagccaccaaaaaaaaaaaaaaaaaaaaaaaaaaaaaaaaaaaaaaaaaaaaaaaaaaaaaaaaaaaaaaaaagaauu

SEQ ID NO: 9373 - RNA, 1844 nt, Artificial Sequence
  mRNA Design i-3 (hSL-A64-N5) comprising derived and/or modified sequence from Pf(3D7)__XP_001351122.1__HsALB_Pf-CSP(19-384)_L(SGG)_Ferritin (opt1)
aggagaaagcuuaccaugaagugggugaccuucaucagccugcucuuccuguucuccagcgccuacucccuguuccaggaguaccagugcuacggcuccagcuccaacacccgggugcucaacgagcugaacuacgacaacgcggggaccaaccuguacaacgagcucgagaugaacuacuacggcaagcaggagaacugguacagccugaagaagaacucccgcagccugggggagaacgacgacggcaacaacgaggacaacgagaagcuccggaagcccaagcacaagaagcugaagcagccggccgacgggaaccccgaccccaacgccaaccccaacguggacccgaacgccaaccccaacgucgaccccaacgccaaccccaacguggacccgaacgcgaaccccaacgccaaccccaacgccaaccccaacgccaacccgaacgcgaaccccaacgccaaccccaacgccaaccccaacgccaacccgaacgccaaccccaacgcgaaccccaacgccaaccccaacgccaacccgaacgccaaccccaacgccaaccccaacgcgaaccccaacgccaacccgaacgccaaccccaacguggaccccaacgccaaccccaacgccaacccgaacgcgaaccccaacgccaaccccaacgccaacccgaacgccaaccccaacgccaaccccaacgcgaaccccaacgccaacccgaacgccaaccccaacgccaaccccaacgcgaaccccaacgccaacccgaacgccaaccccaacgccaaccccaacgccaaccccaacgcgaacccgaacgccaaccccaacaagaacaaccagggcaacggccaggggcacaacaugcccaacgaccccaaccgcaacgucgacgagaacgccaacgccaacuccgccgugaagaacaacaacaacgaggagccgagcgacaagcacaucaaggaguaccugaacaagauccagaacucccucagcacggaguggucccccugcagcgugaccugcggcaacgggauccagguccggaucaagcccggcuccgcgaacaagcccaaggacgagcuggacuacgccaacgacaucgagaagaagaucugcaagauggagaagugcagcuccguguucaacguggucaacagcuccagcggcgggcugagcaaggacaucaucaagcuccugaacgagcaggugaacaaggagaugaacuccagcaaccuguacauguccaugagcuccuggugcuacacccacagccucgacggcgccgggcuguuccuguucgaccacgccgcggaggaguacgagcacgccaagaagcucaucaucuuccugaacgagaacaacguccccgugcagcugaccuccaucagcgccccggagcacaaguucgagggccucacgcagaucuuccagaaggccuacgagcacgagcagcacaucuccgagagcaucaacaacaucguggaccacgccaucaaguccaaggaccacgcgaccuucaacuuccugcagugguacgucgccgagcagcacgaggaggaggugcuguucaaggacauccucgacaagaucgagcugaucgggaacgagaaccacggccuguaccucgccgaccaguacgugaaggggaucgccaagagccgcaaguccugaggacuaguuauaagacugacuagcccgaugggccucccaacgggcccuccuccccuccuugcaccgagauuaaucaaaggcucuuuucagagccaccaaaaaaaaaaaaaaaaaaaaaaaaaaaaaaaaaaaaaaaaaaaaaaaaaaaaaaaaaaaaaaaaagaauu

SEQ ID NO: 9374 - RNA, 1844 nt, Artificial Sequence
  mRNA Design i-3 (hSL-A64-N5) comprising derived and/or modified sequence from Pf(3D7)__XP_001351122.1__HsALB_Pf-CSP(19-384)_L(SGG)_Ferritin (opt1)
aggagaaagcuuaccaugaagugggugaccuucaucagccuccuguuccuguucuccagcgccuacucccuguuccaggaguaccagugcuacggcuccagcuccaacacccgggugcucaacgagcugaacuacgacaacgcggggaccaaccuguacaacgagcucgagaugaacuacuacggcaagcaggagaacugguacagccugaagaagaacucccgcagccugggggagaacgacgacggcaacaacgaggacaacgagaagcuccggaagcccaagcacaagaagcugaagcagccggccgacgggaaccccgaccccaacgccaaccccaacguggacccgaacgccaaccccaacgucgaccccaacgccaaccccaacguggacccgaacgcgaaccccaacgccaaccccaacgccaaccccaacgccaacccgaacgcgaaccccaacgccaaccccaacgccaaccccaacgccaacccgaacgccaaccccaacgcgaaccccaacgccaaccccaacgccaacccgaacgccaaccccaacgccaaccccaacgcgaaccccaacgccaacccgaacgccaaccccaacguggaccccaacgccaaccccaacgccaacccgaacgcgaaccccaacgccaaccccaacgccaacccgaacgccaaccccaacgccaaccccaacgcgaaccccaacgccaacccgaacgccaaccccaacgccaaccccaacgcgaaccccaacgccaacccgaacgccaaccccaacgccaaccccaacgccaaccccaacgcgaacccgaacgccaaccccaacaagaacaaccagggcaacggccaggggcacaacaugcccaacgaccccaaccgcaacgucgacgagaacgccaacgccaacuccgccgugaagaacaacaacaacgaggagccgagcgacaagcacaucaaggaguaccugaacaagauccagaacucccucagcacggaguggucccccugcagcgugaccugcggcaacgggauccagguccggaucaagcccggcuccgcgaacaagcccaaggacgagcuggacuacgccaacgacaucgagaagaagaucugcaagauggagaagugcagcuccguguucaacguggucaacagcuccagcggcgggcugagcaaggacaucaucaagcuccugaacgagcaggugaacaaggagaugaacuccagcaaccuguacauguccaugagcuccuggugcuacacccacagccucgacggcgccgggcuguuccuguucgaccacgccgcggaggaguacgagcacgccaagaagcucaucaucuuccugaacgagaacaacguccccgugcagcugaccuccaucagcgccccggagcacaaguucgagggccucacgcagaucuuccagaaggccuacgagcacgagcagcacaucuccgagagcaucaacaacaucguggaccacgccaucaaguccaaggaccacgcgaccuucaacuuccugcagugguacgucgccgagcagcacgaggaggaggugcuguucaaggacauccucgacaagaucgagcugaucgggaacgagaaccacggccuguaccucgccgaccaguacgugaaggggaucgccaagagccgcaaguccugaggacuaguuauaagacugacuagcccgaugggccucccaacgggcccuccuccccuccuugcaccgagauuaaucaaaggcucuuuucagagccaccaaaaaaaaaaaaaaaaaaaaaaaaaaaaaaaaaaaaaaaaaaaaaaaaaaaaaaaaaaaaaaaaagaauu

SEQ ID NO: 9375 - RNA, 1805 nt, Artificial Sequence
  mRNA Design i-3 (hSL-A64-N5) comprising derived and/or modified sequence from Pf(3D7)__XP_001351122.1__HsALB_Pf-CSP(93-384)_L(PVTN)_HBsAg (opt1)
aggagaaagcuuaccaugaagugggugaccuucaucagccugcucuuccuguucuccagcgccuacuccaagcugaagcagccggccgacgggaaccccgaccccaacgccaaccccaacguggacccgaacgccaaccccaacgucgaccccaacgccaaccccaacguggacccgaacgcgaaccccaacgccaaccccaacgccaaccccaacgccaacccgaacgcgaaccccaacgccaaccccaacgccaaccccaacgccaacccgaacgccaaccccaacgcgaaccccaacgccaaccccaacgccaacccgaacgccaaccccaacgccaaccccaacgcgaaccccaacgccaacccgaacgccaaccccaacguggaccccaacgccaaccccaacgccaacccgaacgcgaaccccaacgccaaccccaacgccaacccgaacgccaaccccaacgccaaccccaacgcgaaccccaacgccaacccgaacgccaaccccaacgccaaccccaacgcgaaccccaacgccaacccgaacgccaaccccaacgccaaccccaacgccaaccccaacgcgaacccgaacgccaaccccaacaagaacaaccagggcaacggccaggggcacaacaugcccaacgaccccaaccgcaacgucgacgagaacgccaacgccaacuccgccgugaagaacaacaacaacgaggagccgagcgacaagcacaucaaggaguaccugaacaagauccagaacucccucagcacggaguggucccccugcagcgugaccugcggcaacgggauccagguccggaucaagcccggcuccgcgaacaagcccaaggacgagcuggacuacgccaacgacaucgagaagaagaucugcaagauggagaagugcagcuccguguucaacguggucaacagcuccccggugacgaacauggagaacaucaccagcggcuuccuggggccccuccuggugcugcaggccggcuucuuccuccugacccgcauccugaccaucccgcagucccucgacagcugguggaccucccugaacuuccucgggggcagccccgucugccuggggcagaacucccagagccccaccuccaaccacagccccaccuccugcccgcccaucugccccggcuaccgguggaugugccugcgccgguucaucaucuuccuguucauccuccugcugugccucaucuuccugcuggugcuccuggacuaccagggcaugcugcccgugugcccgcucauccccgggagcacgaccaccaacaccggccccugcaagacgugcaccacccccgcccaggggaacuccauguucccgagcugcugcugcaccaagcccacggacggcaacugcacgugcauccccauccccuccagcugggcguucgccaaguaccugugggagugggccuccguccgcuucagcuggcugucccuccuggugccguucgugcagugguucgucgggcugagccccaccguguggcucuccgccaucuggaugaugugguacuggggccccagccuguacagcaucgugucccccuucaucccgcugcuccccaucuucuucugccugugggucuacaucugaggacuaguuauaagacugacuagcccgaugggccucccaacgggcccuccuccccuccuugcaccgagauuaaucaaaggcucuuuucagagccaccaaaaaaaaaaaaaaaaaaaaaaaaaaaaaaaaaaaaaaaaaaaaaaaaaaaaaaaaaaaaaaaaagaauu

SEQ ID NO: 9376 - RNA, 1805 nt, Artificial Sequence
  mRNA Design i-3 (hSL-A64-N5) comprising derived and/or modified sequence from Pf(3D7)__XP_001351122.1__HsALB_Pf-CSP(93-384)_L(PVTN)_HBsAg (opt1)
aggagaaagcuuaccaugaagugggugaccuucaucagccuccuguuccuguucuccagcgccuacuccaagcugaagcagccggccgacgggaaccccgaccccaacgccaaccccaacguggacccgaacgccaaccccaacgucgaccccaacgccaaccccaacguggacccgaacgcgaaccccaacgccaaccccaacgccaaccccaacgccaacccgaacgcgaaccccaacgccaaccccaacgccaaccccaacgccaacccgaacgccaaccccaacgcgaaccccaacgccaaccccaacgccaacccgaacgccaaccccaacgccaaccccaacgcgaaccccaacgccaacccgaacgccaaccccaacguggaccccaacgccaaccccaacgccaacccgaacgcgaaccccaacgccaaccccaacgccaacccgaacgccaaccccaacgccaaccccaacgcgaaccccaacgccaacccgaacgccaaccccaacgccaaccccaacgcgaaccccaacgccaacccgaacgccaaccccaacgccaaccccaacgccaaccccaacgcgaacccgaacgccaaccccaacaagaacaaccagggcaacggccaggggcacaacaugcccaacgaccccaaccgcaacgucgacgagaacgccaacgccaacuccgccgugaagaacaacaacaacgaggagccgagcgacaagcacaucaaggaguaccugaacaagauccagaacucccucagcacggaguggucccccugcagcgugaccugcggcaacgggauccagguccggaucaagcccggcuccgcgaacaagcccaaggacgagcuggacuacgccaacgacaucgagaagaagaucugcaagauggagaagugcagcuccguguucaacguggucaacagcuccccggugacgaacauggagaacaucaccagcggcuuccuggggccccuccuggugcugcaggccggcuucuuccuccugacccgcauccugaccaucccgcagucccucgacagcugguggaccucccugaacuuccucgggggcagccccgucugccuggggcagaacucccagagccccaccuccaaccacagccccaccuccugcccgcccaucugccccggcuaccgguggaugugccugcgccgguucaucaucuuccuguucauccuccugcugugccucaucuuccugcuggugcuccuggacuaccagggcaugcugcccgugugcccgcucauccccgggagcacgaccaccaacaccggccccugcaagacgugcaccacccccgcccaggggaacuccauguucccgagcugcugcugcaccaagcccacggacggcaacugcacgugcauccccauccccuccagcugggcguucgccaaguaccugugggagugggccuccguccgcuucagcuggcugucccuccuggugccguucgugcagugguucgucgggcugagccccaccguguggcucuccgccaucuggaugaugugguacuggggccccagccuguacagcaucgugucccccuucaucccgcugcuccccaucuucuucugccugugggucuacaucugaggacuaguuauaagacugacuagcccgaugggccucccaacgggcccuccuccccuccuugcaccgagauuaaucaaaggcucuuuucagagccaccaaaaaaaaaaaaaaaaaaaaaaaaaaaaaaaaaaaaaaaaaaaaaaaaaaaaaaaaaaaaaaaaagaauu

SEQ ID NO: 9377 - RNA, 1466 nt, Artificial Sequence; identical to SEQ ID NO: 7073
  mRNA Design i-3 (hSL-A64-N5) comprising derived and/or modified sequence from Pf(3D7)__XP_001351122.1__HsALB_Pf-CSP(199-377)_L(PVTN)_HBsAg (opt1)

SEQ ID NO: 9378 - RNA, 1163 nt, Artificial Sequence
  mRNA Design i-3 (hSL-A64-N5) comprising derived and/or modified sequence from Pf(3D7)__XP_001351122.1__HsALB_Pf-CSP(19-272)_L(AAY)_Pf-CSP(310-3 27)_L(AAY)_Pf-CSP(346-375) (opt1)
aggagaaagcuuaccaugaagugggugaccuucaucagccuccuguuccuguucuccagcgccuacucccuguuccaggaguaccagugcuacggcuccagcuccaacacccgggugcucaacgagcugaacuacgacaacgcggggaccaaccuguacaacgagcucgagaugaacuacuacggcaagcaggagaacugguacagccugaagaagaacucccgcagccugggggagaacgacgacggcaacaacgaggacaacgagaagcuccggaagcccaagcacaagaagcugaagcagccggccgacgggaaccccgaccccaacgccaaccccaacguggacccgaacgccaaccccaacgucgaccccaacgccaaccccaacguggacccgaacgcgaaccccaacgccaaccccaacgccaaccccaacgccaacccgaacgcgaaccccaacgccaaccccaacgccaaccccaacgccaacccgaacgccaaccccaacgcgaaccccaacgccaaccccaacgccaacccgaacgccaaccccaacgccaaccccaacgcgaaccccaacgccaacccgaacgccaaccccaacguggaccccaacgccaaccccaacgccaacccgaacgcgaaccccaacgccaaccccaacgccaacccgaacgccaaccccaacgccaaccccaacgcgaaccccaacgccaacccgaacgccaaccccaacgccaaccccaacgcgaaccccaacgccaacccgaacgccaaccccaacgccaaccccaacgccaaccccaacgcgaacccgaacgccaaccccgccgcguaugagccgagcgacaagcacaucaaggaguaccugaacaagauccagaacucccucgcggccuacaucaagcccggcuccgcgaacaagcccaaggacgagcuggacuacgccaacgacaucgagaagaagaucugcaagauggagaagugcagcugaggacuaguuauaagacugacuagcccgaugggccucccaacgggcccuccuccccuccuugcaccgagauuaaucaaaggcucuuuucagagccaccaaaaaaaaaaaaaaaaaaaaaaaaaaaaaaaaaaaaaaaaaaaaaaaaaaaaaaaaaaaaaaaaagaauu

SEQ ID NO: 9379 - RNA, 1163 nt, Artificial Sequence
  mRNA Design i-3 (hSL-A64-N5) comprising derived and/or modified sequence from Pf(3D7)__XP_001351122.1__HsALB_Pf-CSP(19-272)_L(AAY)_Pf-CSP(346-3 75)_L(AAY)_Pf-CSP(310-327) (opt1)
aggagaaagcuuaccaugaagugggugaccuucaucagccuccuguuccuguucuccagcgccuacucccuguuccaggaguaccagugcuacggcuccagcuccaacacccgggugcucaacgagcugaacuacgacaacgcggggaccaaccuguacaacgagcucgagaugaacuacuacggcaagcaggagaacugguacagccugaagaagaacucccgcagccugggggagaacgacgacggcaacaacgaggacaacgagaagcuccggaagcccaagcacaagaagcugaagcagccggccgacgggaaccccgaccccaacgccaaccccaacguggacccgaacgccaaccccaacgucgaccccaacgccaaccccaacguggacccgaacgcgaaccccaacgccaaccccaacgccaaccccaacgccaacccgaacgcgaaccccaacgccaaccccaacgccaaccccaacgccaacccgaacgccaaccccaacgcgaaccccaacgccaaccccaacgccaacccgaacgccaaccccaacgccaaccccaacgcgaaccccaacgccaacccgaacgccaaccccaacguggaccccaacgccaaccccaacgccaacccgaacgcgaaccccaacgccaaccccaacgccaacccgaacgccaaccccaacgccaaccccaacgcgaaccccaacgccaacccgaacgccaaccccaacgccaaccccaacgcgaaccccaacgccaacccgaacgccaaccccaacgccaaccccaacgccaaccccaacgcgaacccgaacgccaaccccgcggccuacaucaagcccggcuccgcgaacaagcccaaggacgagcuggacuacgccaacgacaucgagaagaagaucugcaagauggagaagugcagcgccgcguaugagccgagcgacaagcacaucaaggaguaccugaacaagauccagaacucccucugaggacuaguuauaagacugacuagcccgaugggccucccaacgggcccuccuccccuccuugcaccgagauuaaucaaaggcucuuuucagagccaccaaaaaaaaaaaaaaaaaaaaaaaaaaaaaaaaaaaaaaaaaaaaaaaaaaaaaaaaaaaaaaaaagaauu

SEQ ID NO: 9380 - RNA, 1211 nt, Artificial Sequence
  mRNA Design i-3 (hSL-A64-N5) comprising derived and/or modified sequence from Pf(3D7)__XP_001351122.1__HsALB_Pf-CSP(19-272)_L(AAY)_Pf-CSP(346-3 75)_L(AAY)_Pf-CSP(310-327)_L(AAY)_PADRE (opt1)
aggagaaagcuuaccaugaagugggugaccuucaucagccuccuguuccuguucuccagcgccuacucccuguuccaggaguaccagugcuacggcuccagcuccaacacccgggugcucaacgagcugaacuacgacaacgcggggaccaaccuguacaacgagcucgagaugaacuacuacggcaagcaggagaacugguacagccugaagaagaacucccgcagccugggggagaacgacgacggcaacaacgaggacaacgagaagcuccggaagcccaagcacaagaagcugaagcagccggccgacgggaaccccgaccccaacgccaaccccaacguggacccgaacgccaaccccaacgucgaccccaacgccaaccccaacguggacccgaacgcgaaccccaacgccaaccccaacgccaaccccaacgccaacccgaacgcgaaccccaacgccaaccccaacgccaaccccaacgccaacccgaacgccaaccccaacgcgaaccccaacgccaaccccaacgccaacccgaacgccaaccccaacgccaaccccaacgcgaaccccaacgccaacccgaacgccaaccccaacguggaccccaacgccaaccccaacgccaacccgaacgcgaaccccaacgccaaccccaacgccaacccgaacgccaaccccaacgccaaccccaacgcgaaccccaacgccaacccgaacgccaaccccaacgccaaccccaacgcgaaccccaacgccaacccgaacgccaaccccaacgccaaccccaacgccaaccccaacgcgaacccgaacgccaaccccgccgcguauaucaagcccggcuccgcgaacaagcccaaggacgagcuggacuacgccaacgacaucgagaagaagaucugcaagauggagaagugcagcgcggccuacgagccgagcgacaagcacaucaaggaguaccugaacaagauccagaacucccucgccgccuacgccaaguucguggccgccuggacccugaaggcggccgccugaggacuaguuauaagacugacuagcccgaugggccucccaacgggcccuccuccccuccuugcaccgagauuaaucaaaggcucuuuucagagccaccaaaaaaaaaaaaaaaaaaaaaaaaaaaaaaaaaaaaaaaaaaaaaaaaaaaaaaaaaaaaaaaaagaauu

SEQ ID NO: 9381 - RNA, 1211 nt, Artificial Sequence
  mRNA Design i-3 (hSL-A64-N5) comprising derived and/or modified sequence from Pf(3D7)__XP_001351122.1__HsALB_Pf-CSP(19-272)_L(AAY)_Pf-CSP(310-3 27)_L(AAY)_Pf-CSP(346-375)_L(AAY)_PADRE (opt1)
aggagaaagcuuaccaugaagugggugaccuucaucagccuccuguuccuguucuccagcgccuacucccuguuccaggaguaccagugcuacggcuccagcuccaacacccgggugcucaacgagcugaacuacgacaacgcggggaccaaccuguacaacgagcucgagaugaacuacuacggcaagcaggagaacugguacagccugaagaagaacucccgcagccugggggagaacgacgacggcaacaacgaggacaacgagaagcuccggaagcccaagcacaagaagcugaagcagccggccgacgggaaccccgaccccaacgccaaccccaacguggacccgaacgccaaccccaacgucgaccccaacgccaaccccaacguggacccgaacgcgaaccccaacgccaaccccaacgccaaccccaacgccaacccgaacgcgaaccccaacgccaaccccaacgccaaccccaacgccaacccgaacgccaaccccaacgcgaaccccaacgccaaccccaacgccaacccgaacgccaaccccaacgccaaccccaacgcgaaccccaacgccaacccgaacgccaaccccaacguggaccccaacgccaaccccaacgccaacccgaacgcgaaccccaacgccaaccccaacgccaacccgaacgccaaccccaacgccaaccccaacgcgaaccccaacgccaacccgaacgccaaccccaacgccaaccccaacgcgaaccccaacgccaacccgaacgccaaccccaacgccaaccccaacgccaaccccaacgcgaacccgaacgccaaccccgccgcguaugagccgagcgacaagcacaucaaggaguaccugaacaagauccagaacucccucgcggccuacaucaagcccggcuccgcgaacaagcccaaggacgagcuggacuacgccaacgacaucgagaagaagaucugcaagauggagaagugcagcgccgccuacgccaaguucguggccgccuggacccugaaggcggccgccugaggacuaguuauaagacugacuagcccgaugggccucccaacgggcccuccuccccuccuugcaccgagauuaaucaaaggcucuuuucagagccaccaaaaaaaaaaaaaaaaaaaaaaaaaaaaaaaaaaaaaaaaaaaaaaaaaaaaaaaaaaaaaaaaagaauu

SEQ ID NO: 9382 - RNA, 1265 nt, Artificial Sequence
  mRNA Design i-3 (hSL-A64-N5) comprising derived and/or modified sequence from Pf(3D7)__XP_001351122.1__HsALB_Pf-CSP(19-272)_L(AAY)_Pf-CSP(310-3 27)_L(AAY)_Pf-CSP(346-375)_L(AAY)_PADRE_L(AAY)_P2 (opt1)
aggagaaagcuuaccaugaagugggugaccuucaucagccuccuguuccuguucuccagcgccuacucccuguuccaggaguaccagugcuacggcuccagcuccaacacccgggugcucaacgagcugaacuacgacaacgcggggaccaaccuguacaacgagcucgagaugaacuacuacggcaagcaggagaacugguacagccugaagaagaacucccgcagccugggggagaacgacgacggcaacaacgaggacaacgagaagcuccggaagcccaagcacaagaagcugaagcagccggccgacgggaaccccgaccccaacgccaaccccaacguggacccgaacgccaaccccaacgucgaccccaacgccaaccccaacguggacccgaacgcgaaccccaacgccaaccccaacgccaaccccaacgccaacccgaacgcgaaccccaacgccaaccccaacgccaaccccaacgccaacccgaacgccaaccccaacgcgaaccccaacgccaaccccaacgccaacccgaacgccaaccccaacgccaaccccaacgcgaaccccaacgccaacccgaacgccaaccccaacguggaccccaacgccaaccccaacgccaacccgaacgcgaaccccaacgccaaccccaacgccaacccgaacgccaaccccaacgccaaccccaacgcgaaccccaacgccaacccgaacgccaaccccaacgccaaccccaacgcgaaccccaacgccaacccgaacgccaaccccaacgccaaccccaacgccaaccccaacgcgaacccgaacgccaaccccgcggccuacgagccgagcgacaagcacaucaaggaguaccugaacaagauccagaacucccucgccgcguauaucaagcccggcuccgcgaacaagcccaaggacgagcuggacuacgccaacgacaucgagaagaagaucugcaagauggagaagugcagcgccgccuacgccaaguucguggccgccuggacccugaaggcggccgccgccgcuuaccaguacaucaaggccaacagcaaguucaucggcaucaccgagcugugaggacuaguuauaagacugacuagcccgaugggccucccaacgggcccuccuccccuccuugcaccgagauuaaucaaaggcucuuuucagagccaccaaaaaaaaaaaaaaaaaaaaaaaaaaaaaaaaaaaaaaaaaaaaaaaaaaaaaaaaaaaaaaaaagaauu

SEQ ID NO: 9383 - RNA, 1229 nt, Artificial Sequence
  mRNA Design i-3 (hSL-A64-N5) comprising derived and/or modified sequence from Pf(3D7)__XP_001351122.1__HsALB_Pf-CSP(19-272)_L(AAY)_Pf-CSP(310-3 27)_Linker (AAY)_Pf-CSP(346-397) (opt1)
aggagaaagcuuaccaugaagugggugaccuucaucagccuccuguuccuguucuccagcgccuacucccuguuccaggaguaccagugcuacggcuccagcuccaacacccgggugcucaacgagcugaacuacgacaacgcggggaccaaccuguacaacgagcucgagaugaacuacuacggcaagcaggagaacugguacagccugaagaagaacucccgcagccugggggagaacgacgacggcaacaacgaggacaacgagaagcuccggaagcccaagcacaagaagcugaagcagccggccgacgggaaccccgaccccaacgccaaccccaacguggacccgaacgccaaccccaacgucgaccccaacgccaaccccaacguggacccgaacgcgaaccccaacgccaaccccaacgccaaccccaacgccaacccgaacgcgaaccccaacgccaaccccaacgccaaccccaacgccaacccgaacgccaaccccaacgcgaaccccaacgccaaccccaacgccaacccgaacgccaaccccaacgccaaccccaacgcgaaccccaacgccaacccgaacgccaaccccaacguggaccccaacgccaaccccaacgccaacccgaacgcgaaccccaacgccaaccccaacgccaacccgaacgccaaccccaacgccaaccccaacgcgaaccccaacgccaacccgaacgccaaccccaacgccaaccccaacgcgaaccccaacgccaacccgaacgccaaccccaacgccaaccccaacgccaaccccaacgcgaacccgaacgccaaccccgcggccuacgagccgagcgacaagcacaucaaggaguaccugaacaagauccagaacucccucgccgcguauaucaagcccggcuccgcgaacaagcccaaggacgagcuggacuacgccaacgacaucgagaagaagaucugcaagauggagaagugcagcuccguguucaacguggucaacagcuccaucgggcugaucauggugcucagcuuccuguuccugaacugaggacuaguuauaagacugacuagcccgaugggccucccaacgggcccuccuccccuccuugcaccgagauuaaucaaaggcucuuuucagagccaccaaaaaaaaaaaaaaaaaaaaaaaaaaaaaaaaaaaaaaaaaaaaaaaaaaaaaaaaaaaaaaaaagaauu

SEQ ID NO: 9384 - RNA, 1829 nt, Artificial Sequence
  mRNA Design i-3 (hSL-A64-N5) comprising derived and/or modified sequence from Pf(3D7)__XP_001351122.1__LumSynt_L(GGS4-GGG)_Pf-CSP(19-397) (opt1)
aggagaaagcuuaccaugcagaucuacgagggcaagcugaccgccgaggggcuccgcuucggcaucguggccagccgguucaaccacgcgcuggucgaccgccugguggagggggccaucgacgccaucgugcggcacggcgggcgcgaggaggacaucacccucguccgggugcccggcuccugggagaucccgguggccgccggcgagcuggcgcgcaaggaggacaucgacgccgucaucgccaucggggugcugauccggggcgccacgccccacuucgacuacaucgcgagcgagguguccaaggggcucgccgaccugagccuggagcuccgcaagcccaucaccuucggcgucaucaccgccgacacccuggagcaggccaucgagcgggccgggacgaagcacggcaacaagggcugggaggcggcccuguccgccaucgagauggccaaccucuucaagagccugcgcgggggcuccgggggcagcggcggguccggcgggagcggcgggggccuguuccaggaguaccagugcuacggcuccagcuccaacacccgggugcucaacgagcugaacuacgacaacgccgggaccaaccuguacaacgagcucgagaugaacuacuacggcaagcaggagaacugguacagccugaagaagaacucccgcagccugggggagaacgacgacggcaacaacgaggacaacgagaagcuccggaagcccaagcacaagaagcugaagcagccggcggacgggaaccccgaccccaacgccaaccccaacguggacccgaacgccaaccccaacgucgaccccaacgccaaccccaacguggacccgaacgccaaccccaacgcgaaccccaacgccaaccccaacgccaacccgaacgccaaccccaacgccaaccccaacgcgaaccccaacgccaacccgaacgccaaccccaacgccaaccccaacgcgaaccccaacgccaacccgaacgccaaccccaacgccaaccccaacgccaaccccaacgcgaacccgaacgccaaccccaacguggaccccaacgccaacccgaacgccaaccccaacgccaaccccaacgcgaaccccaacgccaacccgaacgccaaccccaacgccaaccccaacgccaaccccaacgcgaacccgaacgccaaccccaacgccaaccccaacgccaaccccaacgcgaacccgaacgccaaccccaacgccaaccccaacgccaaccccaacgccaacccgaacgcgaaccccaacaagaacaaccagggcaacggccaggggcacaacaugcccaacgaccccaaccgcaacgucgacgagaacgccaacgccaacuccgccgugaagaacaacaacaacgaggagccgagcgacaagcacaucaaggaguaccugaacaagauccagaacucccucagcaccgaguggagccccugcuccgugacgugcggcaacgggauccagguccggaucaagcccggcagcgccaacaagcccaaggacgagcuggacuacgcgaacgacaucgagaagaagaucugcaagauggagaagugcuccagcguguucaacguggucaacuccagcaucgggcugaucauggugcucuccuuccuguuccugaacugaggacuaguuauaagacugacuagcccgaugggccucccaacgggcccuccuccccuccuugcaccgagauuaaucaaaggcucuuuucagagccaccaaaaaaaaaaaaaaaaaaaaaaaaaaaaaaaaaaaaaaaaaaaaaaaaaaaaaaaaaaaaaaaaagaauu

SEQ ID NO: 9385 - RNA, 1691 nt, Artificial Sequence
  mRNA Design i-3 (hSL-A64-N5) comprising derived and/or modified sequence from Pf(3D7)__XP_001351122.1__HsALB_Pf-CSP(19-272)_L(PVTN)_HBsAg (opt1)
aggagaaagcuuaccaugaagugggugaccuucaucagccuccuguuccuguucuccagcgccuacucccuguuccaggaguaccagugcuacggcagcuccagcaacacccgcguccucaacgagcugaacuacgacaacgccgggaccaaccuguacaacgagcucgagaugaacuacuacggcaagcaggagaacugguacucccugaagaagaacagccggucccugggggagaacgacgacggcaacaacgaggacaacgagaagcuccgcaagcccaagcacaagaagcugaagcagccggcggacgggaaccccgaccccaacgccaaccccaacguggacccgaacgccaaccccaacguggaccccaacgccaaccccaacgucgacccgaacgccaaccccaacgcgaaccccaacgccaaccccaacgccaacccgaacgccaaccccaacgcgaaccccaacgccaaccccaacgccaacccgaacgccaaccccaacgccaaccccaacgcgaaccccaacgccaacccgaacgccaaccccaacgccaaccccaacgccaaccccaacgcgaacccgaacgccaaccccaacguggaccccaacgccaaccccaacgccaacccgaacgccaaccccaacgcgaaccccaacgccaacccgaacgccaaccccaacgccaaccccaacgccaaccccaacgcgaacccgaacgccaaccccaacgccaaccccaacgccaaccccaacgcgaacccgaacgccaaccccaacgccaaccccaacgccaaccccaacgccaacccgaacgcgaacccgcccgugaccaacauggagaacaucaccagcggcuuccugggcccccuccugguccugcaggccggguucuuccuccugacccggauccugacgaucccccagucccucgacagcugguggaccucccugaacuuccugggcgggagccccgugugccucggccagaacucccagagccccaccuccaaccacagccccaccuccugcccgcccaucugccccggguaccgcuggaugugccugcggcgcuucaucaucuuccuguucauccuccugcugugccucaucuuccugcuggugcuccuggacuaccagggcaugcugcccgucugcccgcucauccccggcagcacgaccaccaacaccgggcccugcaagacgugcaccaccccggcccagggcaacagcauguuccccuccugcugcugcaccaagcccacggacgggaacugcacgugcauccccaucccgagcuccugggccuucgccaaguaccugugggagugggcgagcgugcgguucuccuggcugagccuccuggugcccuucguccagugguucgugggccugucccccaccguguggcucagcgccaucuggaugaugugguacuggggccccucccuguacagcaucgucuccccguucaucccccugcuccccaucuucuucugccuguggguguacaucugaggacuaguuauaagacugacuagcccgaugggccucccaacgggcccuccuccccuccuugcaccgagauuaaucaaaggcucuuuucagagccaccaaaaaaaaaaaaaaaaaaaaaaaaaaaaaaaaaaaaaaaaaaaaaaaaaaaaaaaaaaaaaaaaagaauu

SEQ ID NO: 9386 - RNA, 1808 nt, Artificial Sequence
  mRNA Design i-3 (hSL-A64-N5) comprising derived and/or modified sequence from Pf(3D7)__XP_001351122.1__HsALB_Pf-CSP(19-272)_L(AAY)_Pf-CSP(346-3 65)_L(AAY)_PADRE_L(PVTN)_HBsAg (opt1)
aggagaaagcuuaccaugaagugggugaccuucaucagccugcuguuccuguucuccagcgccuacucccuguuccaggaguaccagugcuacggcagcuccagcaacacccgcguccucaacgagcugaacuacgacaacgccgggaccaaccuguacaacgagcucgagaugaacuacuacggcaagcaggagaacugguacucccugaagaagaacagccggucccugggggagaacgacgacggcaacaacgaggacaacgagaagcuccgcaagcccaagcacaagaagcugaagcagccggcggacgggaaccccgaccccaacgccaaccccaacguggacccgaacgccaaccccaacguggaccccaacgccaaccccaacgucgacccgaacgccaaccccaacgcgaaccccaacgccaaccccaacgccaacccgaacgccaaccccaacgcgaaccccaacgccaaccccaacgccaacccgaacgccaaccccaacgccaaccccaacgcgaaccccaacgccaacccgaacgccaaccccaacgccaaccccaacgccaaccccaacgcgaacccgaacgccaaccccaacguggaccccaacgccaaccccaacgccaacccgaacgccaaccccaacgcgaaccccaacgccaacccgaacgccaaccccaacgccaaccccaacgccaaccccaacgcgaacccgaacgccaaccccaacgccaaccccaacgccaaccccaacgcgaacccgaacgccaaccccaacgccaaccccaacgccaaccccaacgccaacccgaacgcgaaccccgccgccuacaucaagcccggcagcgccaacaagcccaaggacgagcuggacuacgccaacgacaucgaggcggccuacgccaaguucguggccgccuggacccucaaggcggccgccccggucaccaacauggagaacaucaccuccggcuuccuggggccccugcucgugcugcaggccggcuucuuccugcucacgcggauccugaccaucccccagagccuggacuccugguggaccagccucaacuuccucgggggcucccccgugugccuggggcagaacagccaguccccgaccagcaaccacucccccacgagcugcccgcccaucugccccggcuaccgcuggaugugccuccggcgcuucaucaucuuccuguucauccugcuccugugccugaucuuccuccugguccugcucgacuaccagggcaugcugcccgugugcccccugaucccggggagcaccaccaccaacacgggccccugcaagaccugcaccacccccgcgcaggggaacuccauguuccccagcugcugcugcacgaagccgaccgacggcaacugcacgugcauccccauccccuccagcugggccuucgccaaguaccucugggagugggccuccgugcgguucagcuggcugucccugcucguccccuucgugcagugguucgugggccugagcccgaccgucuggcuguccgccaucuggaugaugugguacugggggcccagccucuacuccaucgugagccccuucaucccccugcugccgaucuucuucugccucuggguguacaucugaggacuaguuauaagacugacuagcccgaugggccucccaacgggcccuccuccccuccuugcaccgagauuaaucaaaggcucuuuucagagccaccaaaaaaaaaaaaaaaaaaaaaaaaaaaaaaaaaaaaaaaaaaaaaaaaaaaaaaaaaaaaaaaaagaauu

SEQ ID NO: 9387 - RNA, 2027 nt, Artificial Sequence
  mRNA Design i-3 (hSL-A64-N5) comprising derived and/or modified sequence from Pf(3D7)__XP_001351122.1__HsALB_Pf-CSP(19-384)_L(PVTN)_HBsAg (opt1)
aggagaaagcuuaccaugaagugggugaccuucaucagccugcuguuccuguucuccagcgccuacucccuguuccaggaguaccagugcuacggcagcuccagcaacacccgcguccucaacgagcugaacuacgacaacgccgggacgaaccuguacaacgagcucgagaugaacuacuacggcaagcaggagaacugguacucccugaagaagaacagccggucccugggggagaacgacgacggcaacaacgaggacaacgagaagcuccgcaagcccaagcacaagaagcugaagcagccggcggacgggaaccccgaccccaacgccaaccccaacguggacccgaacgccaaccccaacguggaccccaacgccaaccccaacgucgacccgaacgccaaccccaacgcgaaccccaacgccaaccccaacgccaacccgaacgccaaccccaacgcgaaccccaacgccaaccccaacgccaacccgaacgccaaccccaacgccaaccccaacgcgaaccccaacgccaacccgaacgccaaccccaacgccaaccccaacgccaaccccaacgcgaacccgaacgccaaccccaacguggaccccaacgccaaccccaacgccaacccgaacgccaaccccaacgcgaaccccaacgccaacccgaacgccaaccccaacgccaaccccaacgccaaccccaacgcgaacccgaacgccaaccccaacgccaaccccaacgccaaccccaacgcgaacccgaacgccaaccccaacgccaaccccaacgccaaccccaacgccaacccgaacgcgaaccccaacaagaacaaccagggcaacggccaggggcacaacaugcccaacgaccccaaccggaacguggacgagaacgccaacgccaacagcgccgucaagaacaacaacaacgaggagccguccgacaagcacaucaaggaguaccugaacaagauccagaacagccucuccaccgaguggagccccugcuccgugaccugcggcaacgggauccaggugcgcaucaagcccggcagcgccaacaagcccaaggacgagcuggacuacgcgaacgacaucgagaagaagaucugcaagauggagaagugcuccagcgucuucaacguggugaacuccagcccggucaccaacauggagaacaucacgagcggguuccugggcccccuccuggugcugcaggccggcuucuuccuccugacccggauccugaccaucccccagucccucgacagcugguggaccucccugaacuuccucgggggcagccccgugugccucgggcagaacucccagagcccgacguccaaccacagccccaccuccugcccgcccaucugccccggcuaccgcuggaugugccugcggcgcuucaucaucuuccuguucauccuccugcugugccucaucuuccugcugguccuccuggacuaccagggcaugcugcccgugugcccccucaucccggggagcaccaccacgaacaccggccccugcaagaccugcaccacgcccgcccaggggaacuccauguuccccagcugcugcugcaccaagccgaccgacggcaacugcacgugcauccccauccccuccagcugggccuucgccaaguaccugugggagugggcguccgugcgguucagcuggcugucccuccugguccccuucgugcagugguucguggggcugagcccgaccgucuggcucuccgccaucuggaugaugugguacuggggccccagccuguacagcaucgugucccccuucaucccccugcucccgaucuucuucugccuguggguguacaucugaggacuaguuauaagacugacuagcccgaugggccucccaacgggcccuccuccccuccuugcaccgagauuaaucaaaggcucuuuucagagccaccaaaaaaaaaaaaaaaaaaaaaaaaaaaaaaaaaaaaaaaaaaaaaaaaaaaaaaaaaaaaaaaaagaauu

SEQ ID NO: 9388 - RNA, 1844 nt, Artificial Sequence
  mRNA Design i-3 (hSL-A64-N5) comprising derived and/or modified sequence from Pf(3D7)__XP_001351122.1__HsALB_Pf-CSP(19-384)_L(SGG)_Ferritin (opt1)
aggagaaagcuuaccaugaagugggugaccuucaucagccuccuguuccuguucuccagcgccuacucccuguuccaggaguaccagugcuacggcagcuccagcaacacccggguccucaacgagcugaacuacgacaacgccgggacgaaccuguacaacgagcucgagaugaacuacuacggcaagcaggagaacugguacucccugaagaagaacagccggucccugggggagaacgacgacggcaacaacgaggacaacgagaagcuccgcaagcccaagcacaagaagcugaagcagccggcggacgggaaccccgaccccaacgccaaccccaacguggacccgaacgccaaccccaacguggaccccaacgccaaccccaacgucgacccgaacgccaaccccaacgcgaaccccaacgccaaccccaacgccaacccgaacgccaaccccaacgcgaaccccaacgccaaccccaacgccaacccgaacgccaaccccaacgccaaccccaacgcgaaccccaacgccaacccgaacgccaaccccaacgccaaccccaacgccaaccccaacgcgaacccgaacgccaaccccaacguggaccccaacgccaaccccaacgccaacccgaacgccaaccccaacgcgaaccccaacgccaacccgaacgccaaccccaacgccaaccccaacgccaaccccaacgcgaacccgaacgccaaccccaacgccaaccccaacgccaaccccaacgcgaacccgaacgccaaccccaacgccaaccccaacgccaaccccaacgccaacccgaacgcgaaccccaacaagaacaaccagggcaacggccaggggcacaacaugcccaacgaccccaaccggaacguggacgagaacgccaacgccaacagcgccgucaagaacaacaacaacgaggagccguccgacaagcacaucaaggaguaccugaacaagauccagaacagccucuccaccgaguggagccccugcuccgugaccugcggcaacgggauccaggugcgcaucaagcccggcagcgccaacaagcccaaggacgagcuggacuacgcgaacgacaucgagaagaagaucugcaagauggagaagugcuccagcgucuucaacguggugaacuccagcagcgggggccuguccaaggacaucaucaagcuccugaacgagcaggucaacaaggagaugaacagcuccaaccuguacaugagcauguccagcuggugcuacacccacucccucgacggcgccgggcuguuccuguucgaccacgccgccgaggaguacgagcacgccaagaagcucaucaucuuccugaacgagaacaacgugccggugcagcugacgagcaucuccgcgcccgagcacaaguucgagggccucacccagaucuuccagaaggccuacgagcacgagcagcacaucagcgaguccaucaacaacaucgucgaccacgccaucaagagcaaggaccacgccaccuucaacuuccugcagugguacguggcggagcagcacgaggaggaggugcuguucaaggacauccucgacaagaucgagcugaucgggaacgagaaccacggccuguaccucgccgaccaguacgucaagggcaucgccaagucccgcaagagcugaggacuaguuauaagacugacuagcccgaugggccucccaacgggcccuccuccccuccuugcaccgagauuaaucaaaggcucuuuucagagccaccaaaaaaaaaaaaaaaaaaaaaaaaaaaaaaaaaaaaaaaaaaaaaaaaaaaaaaaaaaaaaaaaagaauu

SEQ ID NO: 9389 - RNA, 1805 nt, Artificial Sequence
  mRNA Design i-3 (hSL-A64-N5) comprising derived and/or modified sequence from Pf(3D7)__XP_001351122.1__HsALB_Pf-CSP(93-384)_L(PVTN)_HBsAg (opt1)
aggagaaagcuuaccaugaagugggugaccuucaucagccuccuguuccuguucuccagcgccuacuccaagcugaagcagcccgccgacggcaacccggaccccaacgcgaaccccaacgucgaccccaacgccaacccgaacguggaccccaacgccaaccccaacguggaccccaacgccaacccgaacgccaaccccaacgcgaaccccaacgccaaccccaacgccaacccgaacgccaaccccaacgcgaaccccaacgccaaccccaacgccaacccgaacgccaaccccaacgccaaccccaacgcgaaccccaacgccaacccgaacgccaaccccaacgccaaccccaacgccaaccccaacgcgaacccgaacgucgaccccaacgccaaccccaacgccaaccccaacgccaacccgaacgccaaccccaacgcgaaccccaacgccaacccgaacgccaaccccaacgccaaccccaacgccaaccccaacgcgaacccgaacgccaaccccaacgccaaccccaacgccaaccccaacgcgaacccgaacgccaaccccaacgccaaccccaacgccaaccccaacgccaacccgaacaagaacaaccaggggaacggccaggggcacaacaugcccaacgaccccaaccgcaacguggacgagaacgcgaacgccaacagcgccgugaagaacaacaacaacgaggagcccuccgacaagcacaucaaggaguaccucaacaagauccagaacagccuguccaccgaguggagcccgugcuccgugaccugcggcaacgggauccagguccggaucaagcccggcagcgccaacaagcccaaggacgagcuggacuacgccaacgacaucgagaagaagaucugcaagauggagaagugcuccagcguguucaacgucgugaacuccagccccgugaccaacauggagaacaucaccuccggcuuccucgggccgcugcugguccuccaggcgggcuucuuccugcugacccgcauccucacgaucccccagagccuggacuccugguggaccagccugaacuuccucgggggcucccccgugugccuggggcagaacagccagagccccaccuccaaccacagcccgaccuccugcccgcccaucugccccggcuaccgguggaugugccugcgccgguucaucaucuuccucuucauccugcugcucugccugaucuuccugcucgugcugcuggacuaccagggcaugcuccccgucugcccccugauccccgggagcacgaccaccaacaccggcccgugcaagacgugcaccacccccgcccaggggaacuccauguuccccagcugcugcugcaccaagcccacggacggcaacugcacgugcaucccgauccccuccagcugggccuucgccaaguaccugugggagugggccuccgugcgcuucagcuggcucucccugcuggugcccuucguccagugguucgugggccucagccccaccguguggcuguccgcgaucuggaugaugugguacugggggccgagccuguacuccaucgucagccccuucaucccccuccugcccaucuucuucugccuguggguguacaucugaggacuaguuauaagacugacuagcccgaugggccucccaacgggcccuccuccccuccuugcaccgagauuaaucaaaggcucuuuucagagccaccaaaaaaaaaaaaaaaaaaaaaaaaaaaaaaaaaaaaaaaaaaaaaaaaaaaaaaaaaaaaaaaaagaauu

SEQ ID NO: 9390 - RNA, 1466 nt, Artificial Sequence; identical to SEQ ID NO: 7103
  mRNA Design i-3 (hSL-A64-N5) comprising derived and/or modified sequence from Pf(3D7)__XP_001351122.1__HsALB_Pf-CSP(199-377)_L(PVTN)_HBsAg (opt1)

SEQ ID NO: 9391 - RNA, 1163 nt, Artificial Sequence
  mRNA Design i-3 (hSL-A64-N5) comprising derived and/or modified sequence from Pf(3D7)__XP_001351122.1__HsALB_Pf-CSP(19-272)_L(AAY)_Pf-CSP(346-3 75)_L(AAY)_Pf-CSP(310-327) (opt1)
aggagaaagcuuaccaugaagugggugaccuucaucagccuccuguuccuguucuccagcgccuacucccuguuccaggaguaccagugcuacggcagcuccagcaacacccgcguccucaacgagcugaacuacgacaacgccgggacgaaccuguacaacgagcucgagaugaacuacuacggcaagcaggagaacugguacucccugaagaagaacagccggucccugggggagaacgacgacggcaacaacgaggacaacgagaagcuccgcaagcccaagcacaagaagcugaagcagccggcggacgggaaccccgaccccaacgccaaccccaacguggacccgaacgccaaccccaacguggaccccaacgccaaccccaacgucgacccgaacgccaaccccaacgcgaaccccaacgccaaccccaacgccaacccgaacgccaaccccaacgcgaaccccaacgccaaccccaacgccaacccgaacgccaaccccaacgccaaccccaacgcgaaccccaacgccaacccgaacgccaaccccaacgccaaccccaacgccaaccccaacgcgaacccgaacgccaaccccaacguggaccccaacgccaaccccaacgccaacccgaacgccaaccccaacgcgaaccccaacgccaacccgaacgccaaccccaacgccaaccccaacgccaaccccaacgcgaacccgaacgccaaccccaacgccaaccccaacgccaaccccaacgcgaacccgaacgccaaccccaacgccaaccccaacgccaaccccaacgccaacccgaacgcgaaccccgccgccuacaucaagcccggcagcgccaacaagcccaaggacgagcuggacuacgccaacgacaucgagaagaagaucugcaagauggagaagugcuccgcggccuacgagccgagcgacaagcacaucaaggaguaccucaacaagauccagaacucccugugaggacuaguuauaagacugacuagcccgaugggccucccaacgggcccuccuccccuccuugcaccgagauuaaucaaaggcucuuuucagagccaccaaaaaaaaaaaaaaaaaaaaaaaaaaaaaaaaaaaaaaaaaaaaaaaaaaaaaaaaaaaaaaaaagaauu

SEQ ID NO: 9392 - RNA, 1211 nt, Artificial Sequence
  mRNA Design i-3 (hSL-A64-N5) comprising derived and/or modified sequence from Pf(3D7)__XP_001351122.1__HsALB_Pf-CSP(19-272)_L(AAY)_Pf-CSP(346-3 75)_L(AAY)_Pf-CSP(310-327)_L(AAY)_PADRE (opt1)
aggagaaagcuuaccaugaagugggugaccuucaucagccuccuguuccuguucuccagcgccuacucccuguuccaggaguaccagugcuacggcagcuccagcaacacccgcguccucaacgagcugaacuacgacaacgccgggacgaaccuguacaacgagcucgagaugaacuacuacggcaagcaggagaacugguacucccugaagaagaacagccggucccugggggagaacgacgacggcaacaacgaggacaacgagaagcuccgcaagcccaagcacaagaagcugaagcagccggcggacgggaaccccgaccccaacgccaaccccaacguggacccgaacgccaaccccaacguggaccccaacgccaaccccaacgucgacccgaacgccaaccccaacgcgaaccccaacgccaaccccaacgccaacccgaacgccaaccccaacgcgaaccccaacgccaaccccaacgccaacccgaacgccaaccccaacgccaaccccaacgcgaaccccaacgccaacccgaacgccaaccccaacgccaaccccaacgccaaccccaacgcgaacccgaacgccaaccccaacguggaccccaacgccaaccccaacgccaacccgaacgccaaccccaacgcgaaccccaacgccaacccgaacgccaaccccaacgccaaccccaacgccaaccccaacgcgaacccgaacgccaaccccaacgccaaccccaacgccaaccccaacgcgaacccgaacgccaaccccaacgccaaccccaacgccaaccccaacgccaacccgaacgcgaaccccgccgccuacaucaagcccggcagcgccaacaagcccaaggacgagcuggacuacgccaacgacaucgagaagaagaucugcaagauggagaagugcuccgcggccuacgagccgagcgacaagcacaucaaggaguaccucaacaagauccagaacucccuggccgccuacgccaaguucguggcggccuggacccugaaggccgccgcgugaggacuaguuauaagacugacuagcccgaugggccucccaacgggcccuccuccccuccuugcaccgagauuaaucaaaggcucuuuucagagccaccaaaaaaaaaaaaaaaaaaaaaaaaaaaaaaaaaaaaaaaaaaaaaaaaaaaaaaaaaaaaaaaaagaauu

SEQ ID NO: 9393 - RNA, 1211 nt, Artificial Sequence
  mRNA Design i-3 (hSL-A64-N5) comprising derived and/or modified sequence from Pf(3D7)__XP_001351122.1__HsALB_Pf-CSP(19-272)_L(AAY)_Pf-CSP(310-3 27)_L(AAY)_Pf-CSP(346-375)_L(AAY)_PADRE (opt1)
aggagaaagcuuaccaugaagugggugaccuucaucagccuccuguuccuguucuccagcgccuacucccuguuccaggaguaccagugcuacggcagcuccagcaacacccgcguccucaacgagcugaacuacgacaacgccgggacgaaccuguacaacgagcucgagaugaacuacuacggcaagcaggagaacugguacucccugaagaagaacagccggucccugggggagaacgacgacggcaacaacgaggacaacgagaagcuccgcaagcccaagcacaagaagcugaagcagccggcggacgggaaccccgaccccaacgccaaccccaacguggacccgaacgccaaccccaacguggaccccaacgccaaccccaacgucgacccgaacgccaaccccaacgcgaaccccaacgccaaccccaacgccaacccgaacgccaaccccaacgcgaaccccaacgccaaccccaacgccaacccgaacgccaaccccaacgccaaccccaacgcgaaccccaacgccaacccgaacgccaaccccaacgccaaccccaacgccaaccccaacgcgaacccgaacgccaaccccaacguggaccccaacgccaaccccaacgccaacccgaacgccaaccccaacgcgaaccccaacgccaacccgaacgccaaccccaacgccaaccccaacgccaaccccaacgcgaacccgaacgccaaccccaacgccaaccccaacgccaaccccaacgcgaacccgaacgccaaccccaacgccaaccccaacgccaaccccaacgccaacccgaacgcgaaccccgccgccuacgagcccagcgacaagcacaucaaggaguaccugaacaagauccagaacucccucgccgccuacaucaagcccggcagcgcgaacaagccgaaggacgagcuggacuacgccaacgacaucgagaagaagaucugcaagauggagaagugcuccgccgccuacgccaaguucguggcggccuggacccugaaggccgccgcgugaggacuaguuauaagacugacuagcccgaugggccucccaacgggcccuccuccccuccuugcaccgagauuaaucaaaggcucuuuucagagccaccaaaaaaaaaaaaaaaaaaaaaaaaaaaaaaaaaaaaaaaaaaaaaaaaaaaaaaaaaaaaaaaaagaauu

SEQ ID NO: 9394 - RNA, 1265 nt, Artificial Sequence
  mRNA Design i-3 (hSL-A64-N5) comprising derived and/or modified sequence from Pf(3D7)__XP_001351122.1__HsALB_Pf-CSP(19-272)_L(AAY)_Pf-CSP(310-3 27)_L(AAY)_Pf-CSP(346-375)_L(AAY)_PADRE_L(AAY)_P2 (opt1)
aggagaaagcuuaccaugaagugggugaccuucaucagccuccuguuccuguucuccagcgccuacucccuguuccaggaguaccagugcuacggcagcuccagcaacacccgcguccucaacgagcugaacuacgacaacgccgggacgaaccuguacaacgagcucgagaugaacuacuacggcaagcaggagaacugguacucccugaagaagaacagccggucccugggggagaacgacgacggcaacaacgaggacaacgagaagcuccgcaagcccaagcacaagaagcugaagcagccggcggacgggaaccccgaccccaacgccaaccccaacguggacccgaacgccaaccccaacguggaccccaacgccaaccccaacgucgacccgaacgccaaccccaacgcgaaccccaacgccaaccccaacgccaacccgaacgccaaccccaacgcgaaccccaacgccaaccccaacgccaacccgaacgccaaccccaacgccaaccccaacgcgaaccccaacgccaacccgaacgccaaccccaacgccaaccccaacgccaaccccaacgcgaacccgaacgccaaccccaacguggaccccaacgccaaccccaacgccaacccgaacgccaaccccaacgcgaaccccaacgccaacccgaacgccaaccccaacgccaaccccaacgccaaccccaacgcgaacccgaacgccaaccccaacgccaaccccaacgccaaccccaacgcgaacccgaacgccaaccccaacgccaaccccaacgccaaccccaacgccaacccgaacgcgaaccccgccgccuacgagcccagcgacaagcacaucaaggaguaccugaacaagauccagaacucccucgccgccuacaucaagcccggcagcgcgaacaagccgaaggacgagcuggacuacgccaacgacaucgagaagaagaucugcaagauggagaagugcuccgccgccuacgccaaguucguggcggccuggacccugaaggccgccgcggccgccuaccaguacaucaaggccaacagcaaguucaucggcaucaccgagcucugaggacuaguuauaagacugacuagcccgaugggccucccaacgggcccuccuccccuccuugcaccgagauuaaucaaaggcucuuuucagagccaccaaaaaaaaaaaaaaaaaaaaaaaaaaaaaaaaaaaaaaaaaaaaaaaaaaaaaaaaaaaaaaaaagaauu

SEQ ID NO: 9395 - RNA, 1229 nt, Artificial Sequence
  mRNA Design i-3 (hSL-A64-N5) comprising derived and/or modified sequence from Pf(3D7)__XP_001351122.1__HsALB_Pf-CSP(19-272)_L(AAY)_Pf-CSP(310-3 27)_Linker (AAY)_Pf-CSP(346-397) (opt1)
aggagaaagcuuaccaugaagugggugaccuucaucagccuccuguuccuguucuccagcgccuacucccuguuccaggaguaccagugcuacggcagcuccagcaacacccgcguccucaacgagcugaacuacgacaacgccgggacgaaccuguacaacgagcucgagaugaacuacuacggcaagcaggagaacugguacucccugaagaagaacagccggucccugggggagaacgacgacggcaacaacgaggacaacgagaagcuccgcaagcccaagcacaagaagcugaagcagccggcggacgggaaccccgaccccaacgccaaccccaacguggacccgaacgccaaccccaacguggaccccaacgccaaccccaacgucgacccgaacgccaaccccaacgcgaaccccaacgccaaccccaacgccaacccgaacgccaaccccaacgcgaaccccaacgccaaccccaacgccaacccgaacgccaaccccaacgccaaccccaacgcgaaccccaacgccaacccgaacgccaaccccaacgccaaccccaacgccaaccccaacgcgaacccgaacgccaaccccaacguggaccccaacgccaaccccaacgccaacccgaacgccaaccccaacgcgaaccccaacgccaacccgaacgccaaccccaacgccaaccccaacgccaaccccaacgcgaacccgaacgccaaccccaacgccaaccccaacgccaaccccaacgcgaacccgaacgccaaccccaacgccaaccccaacgccaaccccaacgccaacccgaacgcgaaccccgccgccuacgagcccagcgacaagcacaucaaggaguaccugaacaagauccagaacucccucgccgccuacaucaagcccggcagcgcgaacaagccgaaggacgagcuggacuacgccaacgacaucgagaagaagaucugcaagauggagaagugcuccagcguguucaacgucgugaacuccagcaucggccugaucauggugcucuccuuccuguuccugaacugaggacuaguuauaagacugacuagcccgaugggccucccaacgggcccuccuccccuccuugcaccgagauuaaucaaaggcucuuuucagagccaccaaaaaaaaaaaaaaaaaaaaaaaaaaaaaaaaaaaaaaaaaaaaaaaaaaaaaaaaaaaaaaaaagaauu

SEQ ID NO: 9396 - RNA, 1829 nt, Artificial Sequence
  mRNA Design i-3 (hSL-A64-N5) comprising derived and/or modified sequence from Pf(3D7)__XP_001351122.1__LumSynt_L(GGS4-GGG)_Pf-CSP(19-397) (opt2)
aggagaaagcuuaccaugcagaucuacgagggcaagcucaccgccgagggccuccgcuucggcaucgucgccucccgcuucaaccacgcccucgucgaccgccucgucgagggcgccaucgacgccaucguccgccacggcggccgcgaggaggacaucacccucguccgcguccccggcuccugggagauccccgucgccgccggcgagcucgcccgcaaggaggacaucgacgccgucaucgccaucggcguccucauccgcggcgccaccccccacuucgacuacaucgccuccgaggucuccaagggccucgccgaccucucccucgagcuccgcaagcccaucaccuucggcgucaucaccgccgacacccucgagcaggccaucgagcgcgccggcaccaagcacggcaacaagggcugggaggccgcccucuccgccaucgagauggccaaccucuucaagucccuccgcggcggcuccggcggcuccggcggcuccggcggcuccggcggcggccucuuccaggaguaccagugcuacggcuccuccuccaacacccgcguccucaacgagcucaacuacgacaacgccggcaccaaccucuacaacgagcucgagaugaacuacuacggcaagcaggagaacugguacucccucaagaagaacucccgcucccucggcgagaacgacgacggcaacaacgaggacaacgagaagcuccgcaagcccaagcacaagaagcucaagcagcccgccgacggcaaccccgaccccaacgccaaccccaacgucgaccccaacgccaaccccaacgucgaccccaacgccaaccccaacgucgaccccaacgccaaccccaacgccaaccccaacgccaaccccaacgccaaccccaacgccaaccccaacgccaaccccaacgccaaccccaacgccaaccccaacgccaaccccaacgccaaccccaacgccaaccccaacgccaaccccaacgccaaccccaacgccaaccccaacgccaaccccaacgccaaccccaacgccaaccccaacgucgaccccaacgccaaccccaacgccaaccccaacgccaaccccaacgccaaccccaacgccaaccccaacgccaaccccaacgccaaccccaacgccaaccccaacgccaaccccaacgccaaccccaacgccaaccccaacgccaaccccaacgccaaccccaacgccaaccccaacgccaaccccaacgccaaccccaacgccaaccccaacgccaaccccaacaagaacaaccagggcaacggccagggccacaacaugcccaacgaccccaaccgcaacgucgacgagaacgccaacgccaacuccgccgucaagaacaacaacaacgaggagcccuccgacaagcacaucaaggaguaccucaacaagauccagaacucccucuccaccgaguggucccccugcuccgucaccugcggcaacggcauccagguccgcaucaagcccggcuccgccaacaagcccaaggacgagcucgacuacgccaacgacaucgagaagaagaucugcaagauggagaagugcuccuccgucuucaacgucgucaacuccuccaucggccucaucaugguccucuccuuccucuuccucaacugaggacuaguuauaagacugacuagcccgaugggccucccaacgggcccuccuccccuccuugcaccgagauuaaucaaaggcucuuuucagagccaccaaaaaaaaaaaaaaaaaaaaaaaaaaaaaaaaaaaaaaaaaaaaaaaaaaaaaaaaaaaaaaaaagaauu

SEQ ID NO: 9397 - RNA, 1691 nt, Artificial Sequence
  mRNA Design i-3 (hSL-A64-N5) comprising derived and/or modified sequence from Pf(3D7)__XP_001351122.1__HsALB_Pf-CSP(19-272)_L(PVTN)_HBsAg (opt2)
aggagaaagcuuaccaugaagugggucaccuucaucucccuccucuuccucuucuccuccgccuacucccucuuccaggaguaccagugcuacggcuccuccuccaacacccgcguccucaacgagcucaacuacgacaacgccggcaccaaccucuacaacgagcucgagaugaacuacuacggcaagcaggagaacugguacucccucaagaagaacucccgcucccucggcgagaacgacgacggcaacaacgaggacaacgagaagcuccgcaagcccaagcacaagaagcucaagcagcccgccgacggcaaccccgaccccaacgccaaccccaacgucgaccccaacgccaaccccaacgucgaccccaacgccaaccccaacgucgaccccaacgccaaccccaacgccaaccccaacgccaaccccaacgccaaccccaacgccaaccccaacgccaaccccaacgccaaccccaacgccaaccccaacgccaaccccaacgccaaccccaacgccaaccccaacgccaaccccaacgccaaccccaacgccaaccccaacgccaaccccaacgccaaccccaacgccaaccccaacgucgaccccaacgccaaccccaacgccaaccccaacgccaaccccaacgccaaccccaacgccaaccccaacgccaaccccaacgccaaccccaacgccaaccccaacgccaaccccaacgccaaccccaacgccaaccccaacgccaaccccaacgccaaccccaacgccaaccccaacgccaaccccaacgccaaccccaacgccaaccccaacgccaacccccccgucaccaacauggagaacaucaccuccggcuuccucggcccccuccucguccuccaggccggcuucuuccuccucacccgcauccucaccaucccccagucccucgacuccugguggaccucccucaacuuccucggcggcucccccgucugccucggccagaacucccagucccccaccuccaaccacucccccaccuccugcccccccaucugccccggcuaccgcuggaugugccuccgccgcuucaucaucuuccucuucauccuccuccucugccucaucuuccuccucguccuccucgacuaccagggcaugcuccccgucugcccccucauccccggcuccaccaccaccaacaccggccccugcaagaccugcaccacccccgcccagggcaacuccauguuccccuccugcugcugcaccaagcccaccgacggcaacugcaccugcauccccauccccuccuccugggccuucgccaaguaccucugggagugggccuccguccgcuucuccuggcucucccuccucguccccuucguccagugguucgucggccucucccccaccgucuggcucuccgccaucuggaugaugugguacuggggccccucccucuacuccaucgucucccccuucaucccccuccuccccaucuucuucugccucugggucuacaucugaggacuaguuauaagacugacuagcccgaugggccucccaacgggcccuccuccccuccuugcaccgagauuaaucaaaggcucuuuucagagccaccaaaaaaaaaaaaaaaaaaaaaaaaaaaaaaaaaaaaaaaaaaaaaaaaaaaaaaaaaaaaaaaaagaauu

SEQ ID NO: 9398 - RNA, 1808 nt, Artificial Sequence
  mRNA Design i-3 (hSL-A64-N5) comprising derived and/or modified sequence from Pf(3D7)__XP_001351122.1__HsALB_Pf-CSP(19-272)_L(AAY)_Pf-CSP(346-3 65)_L(AAY)_PADRE_L(PVTN)_HBsAg (opt2)
aggagaaagcuuaccaugaagugggucaccuucaucucccuccucuuccucuucuccuccgccuacucccucuuccaggaguaccagugcuacggcuccuccuccaacacccgcguccucaacgagcucaacuacgacaacgccggcaccaaccucuacaacgagcucgagaugaacuacuacggcaagcaggagaacugguacucccucaagaagaacucccgcucccucggcgagaacgacgacggcaacaacgaggacaacgagaagcuccgcaagcccaagcacaagaagcucaagcagcccgccgacggcaaccccgaccccaacgccaaccccaacgucgaccccaacgccaaccccaacgucgaccccaacgccaaccccaacgucgaccccaacgccaaccccaacgccaaccccaacgccaaccccaacgccaaccccaacgccaaccccaacgccaaccccaacgccaaccccaacgccaaccccaacgccaaccccaacgccaaccccaacgccaaccccaacgccaaccccaacgccaaccccaacgccaaccccaacgccaaccccaacgccaaccccaacgccaaccccaacgucgaccccaacgccaaccccaacgccaaccccaacgccaaccccaacgccaaccccaacgccaaccccaacgccaaccccaacgccaaccccaacgccaaccccaacgccaaccccaacgccaaccccaacgccaaccccaacgccaaccccaacgccaaccccaacgccaaccccaacgccaaccccaacgccaaccccaacgccaaccccaacgccaaccccgccgccuacaucaagcccggcuccgccaacaagcccaaggacgagcucgacuacgccaacgacaucgaggccgccuacgccaaguucgucgccgccuggacccucaaggccgccgcccccgucaccaacauggagaacaucaccuccggcuuccucggcccccuccucguccuccaggccggcuucuuccuccucacccgcauccucaccaucccccagucccucgacuccugguggaccucccucaacuuccucggcggcucccccgucugccucggccagaacucccagucccccaccuccaaccacucccccaccuccugcccccccaucugccccggcuaccgcuggaugugccuccgccgcuucaucaucuuccucuucauccuccuccucugccucaucuuccuccucguccuccucgacuaccagggcaugcuccccgucugcccccucauccccggcuccaccaccaccaacaccggccccugcaagaccugcaccacccccgcccagggcaacuccauguuccccuccugcugcugcaccaagcccaccgacggcaacugcaccugcauccccauccccuccuccugggccuucgccaaguaccucugggagugggccuccguccgcuucuccuggcucucccuccucguccccuucguccagugguucgucggccucucccccaccgucuggcucuccgccaucuggaugaugugguacuggggccccucccucuacuccaucgucucccccuucaucccccuccuccccaucuucuucugccucugggucuacaucugaggacuaguuauaagacugacuagcccgaugggccucccaacgggcccuccuccccuccuugcaccgagauuaaucaaaggcucuuuucagagccaccaaaaaaaaaaaaaaaaaaaaaaaaaaaaaaaaaaaaaaaaaaaaaaaaaaaaaaaaaaaaaaaaagaauu

SEQ ID NO: 9399 - RNA, 2027 nt, Artificial Sequence
  mRNA Design i-3 (hSL-A64-N5) comprising derived and/or modified sequence from Pf(3D7)__XP_001351122.1__HsALB_Pf-CSP(19-384)_L(PVTN)_HBsAg (opt2)
aggagaaagcuuaccaugaagugggucaccuucaucucccuccucuuccucuucuccuccgccuacucccucuuccaggaguaccagugcuacggcuccuccuccaacacccgcguccucaacgagcucaacuacgacaacgccggcaccaaccucuacaacgagcucgagaugaacuacuacggcaagcaggagaacugguacucccucaagaagaacucccgcucccucggcgagaacgacgacggcaacaacgaggacaacgagaagcuccgcaagcccaagcacaagaagcucaagcagcccgccgacggcaaccccgaccccaacgccaaccccaacgucgaccccaacgccaaccccaacgucgaccccaacgccaaccccaacgucgaccccaacgccaaccccaacgccaaccccaacgccaaccccaacgccaaccccaacgccaaccccaacgccaaccccaacgccaaccccaacgccaaccccaacgccaaccccaacgccaaccccaacgccaaccccaacgccaaccccaacgccaaccccaacgccaaccccaacgccaaccccaacgccaaccccaacgccaaccccaacgucgaccccaacgccaaccccaacgccaaccccaacgccaaccccaacgccaaccccaacgccaaccccaacgccaaccccaacgccaaccccaacgccaaccccaacgccaaccccaacgccaaccccaacgccaaccccaacgccaaccccaacgccaaccccaacgccaaccccaacgccaaccccaacgccaaccccaacgccaaccccaacgccaaccccaacaagaacaaccagggcaacggccagggccacaacaugcccaacgaccccaaccgcaacgucgacgagaacgccaacgccaacuccgccgucaagaacaacaacaacgaggagcccuccgacaagcacaucaaggaguaccucaacaagauccagaacucccucuccaccgaguggucccccugcuccgucaccugcggcaacggcauccagguccgcaucaagcccggcuccgccaacaagcccaaggacgagcucgacuacgccaacgacaucgagaagaagaucugcaagauggagaagugcuccuccgucuucaacgucgucaacuccucccccgucaccaacauggagaacaucaccuccggcuuccucggcccccuccucguccuccaggccggcuucuuccuccucacccgcauccucaccaucccccagucccucgacuccugguggaccucccucaacuuccucggcggcucccccgucugccucggccagaacucccagucccccaccuccaaccacucccccaccuccugcccccccaucugccccggcuaccgcuggaugugccuccgccgcuucaucaucuuccucuucauccuccuccucugccucaucuuccuccucguccuccucgacuaccagggcaugcuccccgucugcccccucauccccggcuccaccaccaccaacaccggccccugcaagaccugcaccacccccgcccagggcaacuccauguuccccuccugcugcugcaccaagcccaccgacggcaacugcaccugcauccccauccccuccuccugggccuucgccaaguaccucugggagugggccuccguccgcuucuccuggcucucccuccucguccccuucguccagugguucgucggccucucccccaccgucuggcucuccgccaucuggaugaugugguacuggggccccucccucuacuccaucgucucccccuucaucccccuccuccccaucuucuucugccucugggucuacaucugaggacuaguuauaagacugacuagcccgaugggccucccaacgggcccuccuccccuccuugcaccgagauuaaucaaaggcucuuuucagagccaccaaaaaaaaaaaaaaaaaaaaaaaaaaaaaaaaaaaaaaaaaaaaaaaaaaaaaaaaaaaaaaaaagaauu

SEQ ID NO: 9400 - RNA, 1844 nt, Artificial Sequence
  mRNA Design i-3 (hSL-A64-N5) comprising derived and/or modified sequence from Pf(3D7)__XP_001351122.1__HsALB_Pf-CSP(19-384)_L(SGG)_Ferritin (opt2)
aggagaaagcuuaccaugaagugggucaccuucaucucccuccucuuccucuucuccuccgccuacucccucuuccaggaguaccagugcuacggcuccuccuccaacacccgcguccucaacgagcucaacuacgacaacgccggcaccaaccucuacaacgagcucgagaugaacuacuacggcaagcaggagaacugguacucccucaagaagaacucccgcucccucggcgagaacgacgacggcaacaacgaggacaacgagaagcuccgcaagcccaagcacaagaagcucaagcagcccgccgacggcaaccccgaccccaacgccaaccccaacgucgaccccaacgccaaccccaacgucgaccccaacgccaaccccaacgucgaccccaacgccaaccccaacgccaaccccaacgccaaccccaacgccaaccccaacgccaaccccaacgccaaccccaacgccaaccccaacgccaaccccaacgccaaccccaacgccaaccccaacgccaaccccaacgccaaccccaacgccaaccccaacgccaaccccaacgccaaccccaacgccaaccccaacgccaaccccaacgucgaccccaacgccaaccccaacgccaaccccaacgccaaccccaacgccaaccccaacgccaaccccaacgccaaccccaacgccaaccccaacgccaaccccaacgccaaccccaacgccaaccccaacgccaaccccaacgccaaccccaacgccaaccccaacgccaaccccaacgccaaccccaacgccaaccccaacgccaaccccaacgccaaccccaacaagaacaaccagggcaacggccagggccacaacaugcccaacgaccccaaccgcaacgucgacgagaacgccaacgccaacuccgccgucaagaacaacaacaacgaggagcccuccgacaagcacaucaaggaguaccucaacaagauccagaacucccucuccaccgaguggucccccugcuccgucaccugcggcaacggcauccagguccgcaucaagcccggcuccgccaacaagcccaaggacgagcucgacuacgccaacgacaucgagaagaagaucugcaagauggagaagugcuccuccgucuucaacgucgucaacuccuccuccggcggccucuccaaggacaucaucaagcuccucaacgagcaggucaacaaggagaugaacuccuccaaccucuacauguccauguccuccuggugcuacacccacucccucgacggcgccggccucuuccucuucgaccacgccgccgaggaguacgagcacgccaagaagcucaucaucuuccucaacgagaacaacguccccguccagcucaccuccaucuccgcccccgagcacaaguucgagggccucacccagaucuuccagaaggccuacgagcacgagcagcacaucuccgaguccaucaacaacaucgucgaccacgccaucaaguccaaggaccacgccaccuucaacuuccuccagugguacgucgccgagcagcacgaggaggagguccucuucaaggacauccucgacaagaucgagcucaucggcaacgagaaccacggccucuaccucgccgaccaguacgucaagggcaucgccaagucccgcaaguccugaggacuaguuauaagacugacuagcccgaugggccucccaacgggcccuccuccccuccuugcaccgagauuaaucaaaggcucuuuucagagccaccaaaaaaaaaaaaaaaaaaaaaaaaaaaaaaaaaaaaaaaaaaaaaaaaaaaaaaaaaaaaaaaaagaauu

SEQ ID NO: 9401 - RNA, 1805 nt, Artificial Sequence
  mRNA Design i-3 (hSL-A64-N5) comprising derived and/or modified sequence from Pf(3D7)__XP_001351122.1__HsALB_Pf-CSP(93-384)_L(PVTN)_HBsAg (opt2)
aggagaaagcuuaccaugaagugggucaccuucaucucccuccucuuccucuucuccuccgccuacuccaagcucaagcagcccgccgacggcaaccccgaccccaacgccaaccccaacgucgaccccaacgccaaccccaacgucgaccccaacgccaaccccaacgucgaccccaacgccaaccccaacgccaaccccaacgccaaccccaacgccaaccccaacgccaaccccaacgccaaccccaacgccaaccccaacgccaaccccaacgccaaccccaacgccaaccccaacgccaaccccaacgccaaccccaacgccaaccccaacgccaaccccaacgccaaccccaacgccaaccccaacgccaaccccaacgucgaccccaacgccaaccccaacgccaaccccaacgccaaccccaacgccaaccccaacgccaaccccaacgccaaccccaacgccaaccccaacgccaaccccaacgccaaccccaacgccaaccccaacgccaaccccaacgccaaccccaacgccaaccccaacgccaaccccaacgccaaccccaacgccaaccccaacgccaaccccaacgccaaccccaacaagaacaaccagggcaacggccagggccacaacaugcccaacgaccccaaccgcaacgucgacgagaacgccaacgccaacuccgccgucaagaacaacaacaacgaggagcccuccgacaagcacaucaaggaguaccucaacaagauccagaacucccucuccaccgaguggucccccugcuccgucaccugcggcaacggcauccagguccgcaucaagcccggcuccgccaacaagcccaaggacgagcucgacuacgccaacgacaucgagaagaagaucugcaagauggagaagugcuccuccgucuucaacgucgucaacuccucccccgucaccaacauggagaacaucaccuccggcuuccucggcccccuccucguccuccaggccggcuucuuccuccucacccgcauccucaccaucccccagucccucgacuccugguggaccucccucaacuuccucggcggcucccccgucugccucggccagaacucccagucccccaccuccaaccacucccccaccuccugcccccccaucugccccggcuaccgcuggaugugccuccgccgcuucaucaucuuccucuucauccuccuccucugccucaucuuccuccucguccuccucgacuaccagggcaugcuccccgucugcccccucauccccggcuccaccaccaccaacaccggccccugcaagaccugcaccacccccgcccagggcaacuccauguuccccuccugcugcugcaccaagcccaccgacggcaacugcaccugcauccccauccccuccuccugggccuucgccaaguaccucugggagugggccuccguccgcuucuccuggcucucccuccucguccccuucguccagugguucgucggccucucccccaccgucuggcucuccgccaucuggaugaugugguacuggggccccucccucuacuccaucgucucccccuucaucccccuccuccccaucuucuucugccucugggucuacaucugaggacuaguuauaagacugacuagcccgaugggccucccaacgggcccuccuccccuccuugcaccgagauuaaucaaaggcucuuuucagagccaccaaaaaaaaaaaaaaaaaaaaaaaaaaaaaaaaaaaaaaaaaaaaaaaaaaaaaaaaaaaaaaaaagaauu

SEQ ID NO: 9402 - RNA, 1466 nt, Artificial Sequence; identical to SEQ ID NO: 7133
  mRNA Design i-3 (hSL-A64-N5) comprising derived and/or modified sequence from Pf(3D7)__XP_001351122.1__HsALB_Pf-CSP(199-377)_L(PVTN)_HBsAg (opt2)

SEQ ID NO: 9403 - RNA, 1163 nt, Artificial Sequence
  mRNA Design i-3 (hSL-A64-N5) comprising derived and/or modified sequence from Pf(3D7)__XP_001351122.1__HsALB_Pf-CSP(19-272)_L(AAY)_Pf-CSP(346-3 75)_L(AAY)_Pf-CSP(310-327) (opt2)
aggagaaagcuuaccaugaagugggucaccuucaucucccuccucuuccucuucuccuccgccuacucccucuuccaggaguaccagugcuacggcuccuccuccaacacccgcguccucaacgagcucaacuacgacaacgccggcaccaaccucuacaacgagcucgagaugaacuacuacggcaagcaggagaacugguacucccucaagaagaacucccgcucccucggcgagaacgacgacggcaacaacgaggacaacgagaagcuccgcaagcccaagcacaagaagcucaagcagcccgccgacggcaaccccgaccccaacgccaaccccaacgucgaccccaacgccaaccccaacgucgaccccaacgccaaccccaacgucgaccccaacgccaaccccaacgccaaccccaacgccaaccccaacgccaaccccaacgccaaccccaacgccaaccccaacgccaaccccaacgccaaccccaacgccaaccccaacgccaaccccaacgccaaccccaacgccaaccccaacgccaaccccaacgccaaccccaacgccaaccccaacgccaaccccaacgccaaccccaacgucgaccccaacgccaaccccaacgccaaccccaacgccaaccccaacgccaaccccaacgccaaccccaacgccaaccccaacgccaaccccaacgccaaccccaacgccaaccccaacgccaaccccaacgccaaccccaacgccaaccccaacgccaaccccaacgccaaccccaacgccaaccccaacgccaaccccaacgccaaccccaacgccaaccccgccgccuacaucaagcccggcuccgccaacaagcccaaggacgagcucgacuacgccaacgacaucgagaagaagaucugcaagauggagaagugcuccgccgccuacgagcccuccgacaagcacaucaaggaguaccucaacaagauccagaacucccucugaggacuaguuauaagacugacuagcccgaugggccucccaacgggcccuccuccccuccuugcaccgagauuaaucaaaggcucuuuucagagccaccaaaaaaaaaaaaaaaaaaaaaaaaaaaaaaaaaaaaaaaaaaaaaaaaaaaaaaaaaaaaaaaaagaauu

SEQ ID NO: 9404 - RNA, 1211 nt, Artificial Sequence
  mRNA Design i-3 (hSL-A64-N5) comprising derived and/or modified sequence from Pf(3D7)__XP_001351122.1__HsALB_Pf-CSP(19-272)_L(AAY)_Pf-CSP(346-3 75)_L(AAY)_Pf-CSP(310-327)_L(AAY)_PADRE (opt2)
aggagaaagcuuaccaugaagugggucaccuucaucucccuccucuuccucuucuccuccgccuacucccucuuccaggaguaccagugcuacggcuccuccuccaacacccgcguccucaacgagcucaacuacgacaacgccggcaccaaccucuacaacgagcucgagaugaacuacuacggcaagcaggagaacugguacucccucaagaagaacucccgcucccucggcgagaacgacgacggcaacaacgaggacaacgagaagcuccgcaagcccaagcacaagaagcucaagcagcccgccgacggcaaccccgaccccaacgccaaccccaacgucgaccccaacgccaaccccaacgucgaccccaacgccaaccccaacgucgaccccaacgccaaccccaacgccaaccccaacgccaaccccaacgccaaccccaacgccaaccccaacgccaaccccaacgccaaccccaacgccaaccccaacgccaaccccaacgccaaccccaacgccaaccccaacgccaaccccaacgccaaccccaacgccaaccccaacgccaaccccaacgccaaccccaacgccaaccccaacgucgaccccaacgccaaccccaacgccaaccccaacgccaaccccaacgccaaccccaacgccaaccccaacgccaaccccaacgccaaccccaacgccaaccccaacgccaaccccaacgccaaccccaacgccaaccccaacgccaaccccaacgccaaccccaacgccaaccccaacgccaaccccaacgccaaccccaacgccaaccccaacgccaaccccgccgccuacaucaagcccggcuccgccaacaagcccaaggacgagcucgacuacgccaacgacaucgagaagaagaucugcaagauggagaagugcuccgccgccuacgagcccuccgacaagcacaucaaggaguaccucaacaagauccagaacucccucgccgccuacgccaaguucgucgccgccuggacccucaaggccgccgccugaggacuaguuauaagacugacuagcccgaugggccucccaacgggcccuccuccccuccuugcaccgagauuaaucaaaggcucuuuucagagccaccaaaaaaaaaaaaaaaaaaaaaaaaaaaaaaaaaaaaaaaaaaaaaaaaaaaaaaaaaaaaaaaaagaauu

SEQ ID NO: 9405 - RNA, 1211 nt, Artificial Sequence
  mRNA Design i-3 (hSL-A64-N5) comprising derived and/or modified sequence from Pf(3D7)__XP_001351122.1__HsALB_Pf-CSP(19-272)_L(AAY)_Pf-CSP(310-3 27)_L(AAY)_Pf-CSP(346-375)_L(AAY)_PADRE (opt2)
aggagaaagcuuaccaugaagugggucaccuucaucucccuccucuuccucuucuccuccgccuacucccucuuccaggaguaccagugcuacggcuccuccuccaacacccgcguccucaacgagcucaacuacgacaacgccggcaccaaccucuacaacgagcucgagaugaacuacuacggcaagcaggagaacugguacucccucaagaagaacucccgcucccucggcgagaacgacgacggcaacaacgaggacaacgagaagcuccgcaagcccaagcacaagaagcucaagcagcccgccgacggcaaccccgaccccaacgccaaccccaacgucgaccccaacgccaaccccaacgucgaccccaacgccaaccccaacgucgaccccaacgccaaccccaacgccaaccccaacgccaaccccaacgccaaccccaacgccaaccccaacgccaaccccaacgccaaccccaacgccaaccccaacgccaaccccaacgccaaccccaacgccaaccccaacgccaaccccaacgccaaccccaacgccaaccccaacgccaaccccaacgccaaccccaacgccaaccccaacgucgaccccaacgccaaccccaacgccaaccccaacgccaaccccaacgccaaccccaacgccaaccccaacgccaaccccaacgccaaccccaacgccaaccccaacgccaaccccaacgccaaccccaacgccaaccccaacgccaaccccaacgccaaccccaacgccaaccccaacgccaaccccaacgccaaccccaacgccaaccccaacgccaaccccgccgccuacgagcccuccgacaagcacaucaaggaguaccucaacaagauccagaacucccucgccgccuacaucaagcccggcuccgccaacaagcccaaggacgagcucgacuacgccaacgacaucgagaagaagaucugcaagauggagaagugcuccgccgccuacgccaaguucgucgccgccuggacccucaaggccgccgccugaggacuaguuauaagacugacuagcccgaugggccucccaacgggcccuccuccccuccuugcaccgagauuaaucaaaggcucuuuucagagccaccaaaaaaaaaaaaaaaaaaaaaaaaaaaaaaaaaaaaaaaaaaaaaaaaaaaaaaaaaaaaaaaaagaauu

SEQ ID NO: 9406 - RNA, 1265 nt, Artificial Sequence
  mRNA Design i-3 (hSL-A64-N5) comprising derived and/or modified sequence from Pf(3D7)__XP_001351122.1__HsALB_Pf-CSP(19-272)_L(AAY)_Pf-CSP(310-3 27)_L(AAY)_Pf-CSP(346-375)_L(AAY)_PADRE_L(AAY)_P2 (opt2)
aggagaaagcuuaccaugaagugggucaccuucaucucccuccucuuccucuucuccuccgccuacucccucuuccaggaguaccagugcuacggcuccuccuccaacacccgcguccucaacgagcucaacuacgacaacgccggcaccaaccucuacaacgagcucgagaugaacuacuacggcaagcaggagaacugguacucccucaagaagaacucccgcucccucggcgagaacgacgacggcaacaacgaggacaacgagaagcuccgcaagcccaagcacaagaagcucaagcagcccgccgacggcaaccccgaccccaacgccaaccccaacgucgaccccaacgccaaccccaacgucgaccccaacgccaaccccaacgucgaccccaacgccaaccccaacgccaaccccaacgccaaccccaacgccaaccccaacgccaaccccaacgccaaccccaacgccaaccccaacgccaaccccaacgccaaccccaacgccaaccccaacgccaaccccaacgccaaccccaacgccaaccccaacgccaaccccaacgccaaccccaacgccaaccccaacgccaaccccaacgucgaccccaacgccaaccccaacgccaaccccaacgccaaccccaacgccaaccccaacgccaaccccaacgccaaccccaacgccaaccccaacgccaaccccaacgccaaccccaacgccaaccccaacgccaaccccaacgccaaccccaacgccaaccccaacgccaaccccaacgccaaccccaacgccaaccccaacgccaaccccaacgccaaccccgccgccuacgagcccuccgacaagcacaucaaggaguaccucaacaagauccagaacucccucgccgccuacaucaagcccggcuccgccaacaagcccaaggacgagcucgacuacgccaacgacaucgagaagaagaucugcaagauggagaagugcuccgccgccuacgccaaguucgucgccgccuggacccucaaggccgccgccgccgccuaccaguacaucaaggccaacuccaaguucaucggcaucaccgagcucugaggacuaguuauaagacugacuagcccgaugggccucccaacgggcccuccuccccuccuugcaccgagauuaaucaaaggcucuuuucagagccaccaaaaaaaaaaaaaaaaaaaaaaaaaaaaaaaaaaaaaaaaaaaaaaaaaaaaaaaaaaaaaaaaagaauu

SEQ ID NO: 9407 - RNA, 1229 nt, Artificial Sequence
  mRNA Design i-3 (hSL-A64-N5) comprising derived and/or modified sequence from Pf(3D7)__XP_001351122.1__HsALB_Pf-CSP(19-272)_L(AAY)_Pf-CSP(310-3 27)_Linker (AAY)_Pf-CSP(346-397) (opt2)
aggagaaagcuuaccaugaagugggucaccuucaucucccuccucuuccucuucuccuccgccuacucccucuuccaggaguaccagugcuacggcuccuccuccaacacccgcguccucaacgagcucaacuacgacaacgccggcaccaaccucuacaacgagcucgagaugaacuacuacggcaagcaggagaacugguacucccucaagaagaacucccgcucccucggcgagaacgacgacggcaacaacgaggacaacgagaagcuccgcaagcccaagcacaagaagcucaagcagcccgccgacggcaaccccgaccccaacgccaaccccaacgucgaccccaacgccaaccccaacgucgaccccaacgccaaccccaacgucgaccccaacgccaaccccaacgccaaccccaacgccaaccccaacgccaaccccaacgccaaccccaacgccaaccccaacgccaaccccaacgccaaccccaacgccaaccccaacgccaaccccaacgccaaccccaacgccaaccccaacgccaaccccaacgccaaccccaacgccaaccccaacgccaaccccaacgccaaccccaacgucgaccccaacgccaaccccaacgccaaccccaacgccaaccccaacgccaaccccaacgccaaccccaacgccaaccccaacgccaaccccaacgccaaccccaacgccaaccccaacgccaaccccaacgccaaccccaacgccaaccccaacgccaaccccaacgccaaccccaacgccaaccccaacgccaaccccaacgccaaccccaacgccaaccccgccgccuacgagcccuccgacaagcacaucaaggaguaccucaacaagauccagaacucccucgccgccuacaucaagcccggcuccgccaacaagcccaaggacgagcucgacuacgccaacgacaucgagaagaagaucugcaagauggagaagugcuccuccgucuucaacgucgucaacuccuccaucggccucaucaugguccucuccuuccucuuccucaacugaggacuaguuauaagacugacuagcccgaugggccucccaacgggcccuccuccccuccuugcaccgagauuaaucaaaggcucuuuucagagccaccaaaaaaaaaaaaaaaaaaaaaaaaaaaaaaaaaaaaaaaaaaaaaaaaaaaaaaaaaaaaaaaaagaauu

SEQ ID NO: 9408 - RNA, 1829 nt, Artificial Sequence
  mRNA Design i-3 (hSL-A64-N5) comprising derived and/or modified sequence from Pf(3D7)__XP_001351122.1__LumSynt_L(GGS4-GGG)_Pf-CSP(19-397) (opt3)
aggagaaagcuuaccaugcagaucuacgagggcaagcugaccgccgaagggcucagauucggaauuguggcuagcagguuuaaccacgcacuugucgaccggcugguugagggugccauagaugcgaucgugcgccauggcgggcgagaagaggacauuacauugguacgugugcccggauccugggaaaucccugucgcugccggcgaguuagcaagaaaagaggauauugacgccgugaucgcuauagguguucugaucaggggagcaacuccacacuucgauuauauugccucugaagugucaaaggggcuagcugaccucagucuggagcuucggaaaccgaucacguuuggcgucauuaccgccgauacacuggaacaagcgaucgagcgcgcaggcacuaagcaugggaauaaaggaugggaggccgcuuugagcgccauagaaauggcaaaccucuucaagucccugagagguggcucugggggaucgggcgguucagggggaagcggcggcgggcuguuucaggaguaccagugcuauggaaguuccucuaauaccagggugcucaacgaauuaaauuacgacaacgcugguacaaaucuguauaacgagcuugaaaugaauuacuauggcaagcaggagaacugguacagcuugaaaaagaacucccggucacugggggagaaugaugacggaaauaacgaagauaaugagaaacuacgcaagcccaaacacaagaagcucaaacaaccugccgacggcaacccagaucccaacgcgaauccuaacguagacccaaaugccaaccccaauguugacccuaacgcaaauccaaacguggauccgaaugcuaaccccaaugccaacccuaaugcuaacccaaaugccaaccccaacgcaaauccuaacgccaauccaaacgcuaaucccaacgcgaauccgaacgcaaauccuaacgccaaucccaacgcuaauccaaacgccaauccuaacgcaaaccccaaugccaacccaaaugcuaaccccaaugccaacccuaaugcaaacccaaaugucgacccgaacgcgaaucccaacgcuaauccuaacgccaauccaaacgcaaaccccaaugccaacccuaaugcuaacccaaaugccaaccccaaugcaaacccgaaugcuaacccuaaugccaacccaaaugcgaaccccaaugccaacccuaaugcuaaccccaacgcaaauccaaacgccaauccuaacgcuaaucccaacgccaauccaaacgcaaauccgaacaagaauaaccaggguaaugggcagggccauaacaugccuaaugaucccaaccgaaacguggacgaaaaugcgaacgccaauagugcugugaaaaacaauaacaaugaggaaccaagcgauaagcacauuaaagaguaccugaacaagauccaaaauucucuuuccaccgaguggucacccugcagcgucacuugcggaaacggcauucagguuagaaucaaaccugggagugccaauaagccaaaggacgaacuggauuaugcaaacgacaucgagaaaaagauuuguaaaauggaaaaguguucuuccguguucaauguagugaacagcucgauaggauugaucaugguccucucuuuucuguucuuaaauugaggacuaguuauaagacugacuagcccgaugggccucccaacgggcccuccuccccuccuugcaccgagauuaaucaaaggcucuuuucagagccaccaaaaaaaaaaaaaaaaaaaaaaaaaaaaaaaaaaaaaaaaaaaaaaaaaaaaaaaaaaaaaaaaagaauu

SEQ ID NO: 9409 - RNA, 1691 nt, Artificial Sequence
  mRNA Design i-3 (hSL-A64-N5) comprising derived and/or modified sequence from Pf(3D7)__XP_001351122.1__HsALB_Pf-CSP(19-272)_L(PVTN)_HBsAg (opt3)
aggagaaagcuuaccaugaagugggugaccuucaucagccugcucuuucuuuucuccucugccuacucacuguuucaggaguaucaaugcuacggcaguagcuccaacacaagagucuugaaugaauuaaacuaugacaaugcugggacuaaccuguacaaugagcuagaaaugaacuauuacggaaaacaggagaauugguauucucucaagaaaaacucgaggucacugggugaaaaugaugacggcaacaaugaggauaacgagaaacuucggaagcccaagcacaagaaacugaagcagccugcagacgggaauccagauccgaacgccaaucccaacguugacccuaacgcgaauccaaacguggaucccaaugcuaacccuaauguagacccaaacgccaaucccaacgcaaauccuaacgccaauccaaacgcuaauccgaacgcaaaucccaacgccaacccuaaugcuaacccaaaugccaaccccaaugcgaacccuaaugcaaacccaaaugccaaccccaaugcuaacccgaaugccaacccuaaugcaaaccccaacgcuaauccaaacgccaauccuaacgcgaaucccaacguggauccaaaugccaaccccaaugcaaacccuaaugcuaacccaaaugccaacccgaaugcuaaccccaacgccaauccuaacgcaaauccaaacgccaaucccaacgcuaauccuaacgcgaauccaaacgcaaaucccaacgccaauccgaacgcuaauccuaacgccaauccaaacgcaaaccccaaugccaacccuaaugcuaaccccaaugccaacccaccugucacgaauauggaaaacauuaccagcggauucuugggcccccuccuggugcugcaggcaggguuuuuccucuuaacacgcauacugacuaucccacaaagucuugacuccugguggaccucuuugaauuuucuggguggaagcccgguuugucuaggccagaacucccagucaccuacaaguaaucauagccccaccucuugcccacccauuuguccuggcuaccgauggaugugccuccguagauucaucauuuuucuguucauccuucuguugugucucauauuucuguuagugcugcucgauuaccaggggaugcuuccagucugcccccugaucccuggauccacuacaaccaacacggguccguguaaaacuugcaccacaccagcgcaaggcaauucaauguuccccagcuguugcuguacuaagccuaccgacgggaacugcacaugcauuccaauccccaguucuugggcuuuugccaaauauuugugggagugggcauccgugagguucagcuggcuaucgcugcucguaccuuucguucagugguuugugggacugucuccgaccgucuggcuuuccgccauuuggaugaugugguacuggggccccucacuguauaguaucgugagcccauucauaccuuugcuccccaucuuuuucugucuguggguguacauuugaggacuaguuauaagacugacuagcccgaugggccucccaacgggcccuccuccccuccuugcaccgagauuaaucaaaggcucuuuucagagccaccaaaaaaaaaaaaaaaaaaaaaaaaaaaaaaaaaaaaaaaaaaaaaaaaaaaaaaaaaaaaaaaaagaauu

SEQ ID NO: 9410 - RNA, 1808 nt, Artificial Sequence
  mRNA Design i-3 (hSL-A64-N5) comprising derived and/or modified sequence from Pf(3D7)__XP_001351122.1__HsALB_Pf-CSP(19-272)_L(AAY)_Pf-CSP(346-3 65)_L(AAY)_PADRE_L(PVTN)_HBsAg (opt3)
aggagaaagcuuaccaugaagugggugaccuucaucagccugcucuuucuuuucuccucugccuacucacuguuucaggaguaucaaugcuacggcaguagcuccaacacaagagucuugaaugaauuaaacuaugacaaugcugggacuaaccuguacaaugagcuagaaaugaacuauuacggaaaacaggagaauugguauucucucaagaaaaacucgaggucacugggugaaaaugaugacggcaacaaugaggauaacgagaaacuucggaagcccaagcacaagaaacugaagcagccugcagacgggaauccagauccgaacgccaaucccaacguugacccuaacgcgaauccaaacguggaucccaaugcuaacccuaauguagacccaaacgccaaucccaacgcaaauccuaacgccaauccaaacgcuaauccgaacgcaaaucccaacgccaacccuaaugcuaacccaaaugccaaccccaaugcgaacccuaaugcaaacccaaaugccaaccccaaugcuaacccgaaugccaacccuaaugcaaaccccaacgcuaauccaaacgccaauccuaacgcgaaucccaacguggauccaaaugccaaccccaaugcaaacccuaaugcuaacccaaaugccaacccgaaugcuaaccccaacgccaauccuaacgcaaauccaaacgccaaucccaacgcuaauccuaacgcgaauccaaacgcaaaucccaacgccaauccgaacgcuaauccuaacgccaauccaaacgcaaaccccaaugccaacccuaaugcuaaccccaaugccaacccagcagcguacauuaaaccuggaagcgcuaauaagcccaaagacgaauuggauuacgccaacgacauagaggcagccuaugcuaaguucgucgccgcauggacgcucaaggcugccgcgccagugaccaauauggaaaacaucacaaguggcuuucuggguccgcugcucguuuuacaggccggguucuuucugcuuacucgcauuuugaccaucccucaaucccuggauucuugguggacaagccuaaauuuccucggaggcucccccgugugucugggccagaacucacagaguccaaccagcaaucauucucccacuuccugcccuccaauuugucccggguaccgauggaugugccuucguagauuuaucauauuccuguuuaucuugcuccuguguuuaauuuuccugcucguccuucuggacuaucagggaauguugccugugugcccgcuaaucccagguucaacaaccacgaacacuggccccuguaaaaccugcacaacuccugcucaagggaauagcauguuuccaaguuguugcuguaccaagcccacagacggaaacuguaccugcauuccuaucccgucuuccugggcauucgccaaauaccugugggagugggcuagcguaagguucucguggcucucucugcuuguucccuuugugcagugguucgucggccuguccccaacggugugguugucagccauauggaugaugugguauugggguccuagucucuacagcauugugucccccuuuaucccacuguuaccuauuuucuuuugccugugggucuauaucugaggacuaguuauaagacugacuagcccgaugggccucccaacgggcccuccuccccuccuugcaccgagauuaaucaaaggcucuuuucagagccaccaaaaaaaaaaaaaaaaaaaaaaaaaaaaaaaaaaaaaaaaaaaaaaaaaaaaaaaaaaaaaaaaagaauu

SEQ ID NO: 9411 - RNA, 2027 nt, Artificial Sequence
  mRNA Design i-3 (hSL-A64-N5) comprising derived and/or modified sequence from Pf(3D7)__XP_001351122.1__HsALB_Pf-CSP(19-384)_L(PVTN)_HBsAg (opt3)
aggagaaagcuuaccaugaagugggugaccuucaucagccugcucuuucuuuucuccucugccuacucacuguuucaggaguaucaaugcuacggcaguagcuccaacacaagagucuugaaugaauuaaacuaugacaaugcugggacuaaccuguacaaugagcuagaaaugaacuauuacggaaaacaggagaauugguauucucucaagaaaaacucgaggucacugggugaaaaugaugacggcaacaaugaggauaacgagaaacuucggaagcccaagcacaagaaacugaagcagccugcagacgggaauccagauccgaacgccaaucccaacguugacccuaacgcgaauccaaacguggaucccaaugcuaacccuaauguagacccaaacgccaaucccaacgcaaauccuaacgccaauccaaacgcuaauccgaacgcaaaucccaacgccaacccuaaugcuaacccaaaugccaaccccaaugcgaacccuaaugcaaacccaaaugccaaccccaaugcuaacccgaaugccaacccuaaugcaaaccccaacgcuaauccaaacgccaauccuaacgcgaaucccaacguggauccaaaugccaaccccaaugcaaacccuaaugcuaacccaaaugccaacccgaaugcuaaccccaacgccaauccuaacgcaaauccaaacgccaaucccaacgcuaauccuaacgcgaauccaaacgcaaaucccaacgccaauccgaacgcuaauccuaacgccaauccaaacgcaaaccccaaugccaacccuaaugcuaaccccaaugccaacccaaauaaaaacaaucagggaaacggccaaggucauaauaugccuaacgaccccaaucgcaacgucgaugaaaaugcaaacgcgaacagcgcugugaagaauaacaauaacgaggaaccaagugacaaacacauuaaggaguacuugaauaagauacagaacucccucucuacggaguggagcccguguuccguuaccugcgggaauggaauccaggugcgaauuaaaccuggcucagccaacaagcccaaagaugaacuggacuacgcaaaugacaucgagaagaaaauuuguaagauggaaaaaugcaguagcgucuucaacgugguaaauucuuccccaguuacaaacauggagaauaucacuucaggcuuucuggggccccucuuagugcugcaggccggauucuuucuuuugacccguauacugacaaucccucaaagccuagauaguugguggaccucucucaacuuccuggguggcuccccagucugucuugggcagaauagccagucgcccacuucuaaccauuccccuacaucaugcccgccaauuugucccggauauagauggaugugccugaggcgguuuaucauuuucuuguuuauccuccuguuaugucugauauuccuccuugugcuguuggacuaccagggcaugcuaccugugugcccacugauucccgguaguaccacgacuaacaccgggccuuguaagacaugcacuaccccggcucaaggaaauagcauguuucccuccugcuguugcacaaagccaaccgauggcaacuguacgugcaucccuauucccucuagcugggccuucgcaaaauaucucugggaaugggcuucaguccgcuucaguuggcugucccuucugguuccauuugugcagugguucguaggcuugagcccuacuguguggcucucugccaucuggaugaugugguacugggggcccucacuguauaguaucgucagcccauuuauuccguuacugccuauauucuuuugucuauggguguacaucugaggacuaguuauaagacugacuagcccgaugggccucccaacgggcccuccuccccuccuugcaccgagauuaaucaaaggcucuuuucagagccaccaaaaaaaaaaaaaaaaaaaaaaaaaaaaaaaaaaaaaaaaaaaaaaaaaaaaaaaaaaaaaaaaagaauu

SEQ ID NO: 9412 - RNA, 1844 nt, Artificial Sequence
  mRNA Design i-3 (hSL-A64-N5) comprising derived and/or modified sequence from Pf(3D7)__XP_001351122.1__HsALB_Pf-CSP(19-384)_L(SGG)_Ferritin (opt3)
aggagaaagcuuaccaugaagugggugaccuucaucagccugcucuuucuuuucuccucugccuacucacuguuucaggaguaucaaugcuacggcaguagcuccaacacaagagucuugaaugaauuaaacuaugacaaugcugggacuaaccuguacaaugagcuagaaaugaacuauuacggaaaacaggagaauugguauucucucaagaaaaacucgaggucacugggugaaaaugaugacggcaacaaugaggauaacgagaaacuucggaagcccaagcacaagaaacugaagcagccugcagacgggaauccagauccgaacgccaaucccaacguugacccuaacgcgaauccaaacguggaucccaaugcuaacccuaauguagacccaaacgccaaucccaacgcaaauccuaacgccaauccaaacgcuaauccgaacgcaaaucccaacgccaacccuaaugcuaacccaaaugccaaccccaaugcgaacccuaaugcaaacccaaaugccaaccccaaugcuaacccgaaugccaacccuaaugcaaaccccaacgcuaauccaaacgccaauccuaacgcgaaucccaacguggauccaaaugccaaccccaaugcaaacccuaaugcuaacccaaaugccaacccgaaugcuaaccccaacgccaauccuaacgcaaauccaaacgccaaucccaacgcuaauccuaacgcgaauccaaacgcaaaucccaacgccaauccgaacgcuaauccuaacgccaauccaaacgcaaaccccaaugccaacccuaaugcuaaccccaaugccaacccaaauaaaaacaaucagggaaacggccaaggucauaauaugccuaacgaccccaaucgcaacgucgaugaaaaugcaaacgcgaacagcgcugugaagaauaacaauaacgaggaaccaagugacaaacacauuaaggaguacuugaauaagauacagaacucccucucuacggaguggagcccguguuccguuaccugcgggaauggaauccaggugcgaauuaaaccuggcucagccaacaagcccaaagaugaacuggacuacgcaaaugacaucgagaagaaaauuuguaagauggaaaaaugcaguagcgucuucaacgugguaaauucuuccucaggcgggcugagcaaggauaucauaaagcucuuaaacgagcagguuaauaaagaaaugaacaguucuaaucuguauauguccaugagcucgugguguuacacacauucucuugacggagccgguuuguuucuguucgaucacgcugccgaggaguaugaacaugcaaagaaacuaaucauuuuucucaacgagaacaaugugccaguccaacugacuuccaucucagcucccgaacacaaguucgagggccuuacccagauuuuucagaaagccuacgaacacgagcagcauaucagugagagcauaaacaauauuguggaccacgcgaucaaguccaaggaucaugccacauucaacuuucugcaaugguauguggcugaacagcacgaggaagaggucuuguucaaagacauucucgauaagaucgaacugaucgggaaugagaaccacggauuauaccuggcagaccaguauguuaaaggcauugccaagucucguaaaagcugaggacuaguuauaagacugacuagcccgaugggccucccaacgggcccuccuccccuccuugcaccgagauuaaucaaaggcucuuuucagagccaccaaaaaaaaaaaaaaaaaaaaaaaaaaaaaaaaaaaaaaaaaaaaaaaaaaaaaaaaaaaaaaaaagaauu

SEQ ID NO: 9413 - RNA, 1805 nt, Artificial Sequence
  mRNA Design i-3 (hSL-A64-N5) comprising derived and/or modified sequence from Pf(3D7)__XP_001351122.1__HsALB_Pf-CSP(93-384)_L(PVTN)_HBsAg (opt3)
aggagaaagcuuaccaugaagugggugaccuucaucagccugcucuuucuuuucuccucugccuacucaaaacugaagcagcccgcugacggcaacccugauccaaaugcaaacccgaaugucgaccccaacgccaauccuaacguugauccaaaugcgaaccccaauguggacccuaacgcuaauccaaacgccaaucccaacgcaaauccuaacgccaacccaaaugcuaacccgaaugcaaaccccaaugccaacccuaaugcuaacccaaaugccaaccccaaugcgaacccuaaugcaaacccaaaugccaaccccaacgcuaauccgaacgccaauccuaacgcaaaucccaacgcuaauccaaacgccaauccuaacguagaucccaaugcgaacccaaaugccaaccccaaugcaaacccuaacgcuaauccaaacgccaauccgaacgcuaaucccaacgccaauccuaacgcaaauccaaacgccaaucccaacgcuaauccuaacgcgaauccaaacgcaaaccccaaugccaacccgaaugcuaacccuaaugccaacccaaaugcaaaccccaaugccaacccuaaugcuaaccccaauaaaaacaaucaagggaacggacagggucacaauaugccaaacgacccuaacagaaauguggaugagaacgccaaugcaaacagugcggucaagaauaacaauaacgaggaacccagcgacaaacauauuaaggaauauuugaauaagauacagaacuccuuaucuacagaguggucgccaugcucagugacuuguggcaaugggauccagguuaggauuaaaccgggaagcgcuaacaagccuaaagaugaacuggacuacgccaaugauaucgagaagaaaauuugcaagauggagaaguguaguuccguguuuaacgucguaaauucuagccccgugacgaacauggaaaacaucaccuccggcuuccuagguccacuccugguucuucaagcaggguuuuuccuguugacacggauacucacuaucccccagucacuggacaguugguggaccagccugaauuuucucggaggcucuccugugugcuuaggccagaacucccagucaccaacaagcaaucacagucccaccucuuguccuccgauuugcccaggguaucgcuggaugugucugcgacguuucaucauuuuucuuuucaucuugcugcuaugccucauauuucugcuuguccuguuggauuaccaaggaaugcuccccguguguccucugauuccagguuccacuacaaccaacacgggccccugcaaaacuuguaccacuccugcccaggggaauagcauguucccgucgugcugcuguacaaagcccaccgacggaaacugcacauguaucccaauuccuucuuccugggcuuuugccaaauauuuaugggagugggcaucagugagauucaguuggcugagccuccuuguccccuucguucagugguuugugggccuguccccaaccguaugguugucugcuaucuggaugaugugguacugggguccuagccuauauucaaucgugagucccuucauuccacugcucccgauauuuuucugccugugggucuacaucugaggacuaguuauaagacugacuagcccgaugggccucccaacgggcccuccuccccuccuugcaccgagauuaaucaaaggcucuuuucagagccaccaaaaaaaaaaaaaaaaaaaaaaaaaaaaaaaaaaaaaaaaaaaaaaaaaaaaaaaaaaaaaaaaagaauu

SEQ ID NO: 9414 - RNA, 1466 nt, Artificial Sequence; identical to SEQ ID NO: 7163
  mRNA Design i-3 (hSL-A64-N5) comprising derived and/or modified sequence from Pf(3D7)__XP_001351122.1__HsALB_Pf-CSP(199-377)_L(PVTN)_HBsAg (opt3)

SEQ ID NO: 9415 - RNA, 1163 nt, Artificial Sequence
  mRNA Design i-3 (hSL-A64-N5) comprising derived and/or modified sequence from Pf(3D7)__XP_001351122.1__HsALB_Pf-CSP(19-272)_L(AAY)_Pf-CSP(346-3 75)_L(AAY)_Pf-CSP(310-327) (opt3)
aggagaaagcuuaccaugaagugggugaccuucaucagccugcucuuucuuuucuccucugccuacucacuguuucaggaguaucaaugcuacggcaguagcuccaacacaagagucuugaaugaauuaaacuaugacaaugcugggacuaaccuguacaaugagcuagaaaugaacuauuacggaaaacaggagaauugguauucucucaagaaaaacucgaggucacugggugaaaaugaugacggcaacaaugaggauaacgagaaacuucggaagcccaagcacaagaaacugaagcagccugcagacgggaauccagauccgaacgccaaucccaacguugacccuaacgcgaauccaaacguggaucccaaugcuaacccuaauguagacccaaacgccaaucccaacgcaaauccuaacgccaauccaaacgcuaauccgaacgcaaaucccaacgccaacccuaaugcuaacccaaaugccaaccccaaugcgaacccuaaugcaaacccaaaugccaaccccaaugcuaacccgaaugccaacccuaaugcaaaccccaacgcuaauccaaacgccaauccuaacgcgaaucccaacguggauccaaaugccaaccccaaugcaaacccuaaugcuaacccaaaugccaacccgaaugcuaaccccaacgccaauccuaacgcaaauccaaacgccaaucccaacgcuaauccuaacgcgaauccaaacgcaaaucccaacgccaauccgaacgcuaauccuaacgccaauccaaacgcaaaccccaaugccaacccuaaugcuaaccccaaugccaacccagcagcguacauuaaaccuggaagcgcuaauaagcccaaagacgaauuggauuacgccaacgacauagagaagaagaucuguaaaauggaaaagugcagugcagccuaugagccauccgauaaacauauuaaggaguaccucaauaaaauccagaacucucugugaggacuaguuauaagacugacuagcccgaugggccucccaacgggcccuccuccccuccuugcaccgagauuaaucaaaggcucuuuucagagccaccaaaaaaaaaaaaaaaaaaaaaaaaaaaaaaaaaaaaaaaaaaaaaaaaaaaaaaaaaaaaaaaaagaauu

SEQ ID NO: 9416 - RNA, 1211 nt, Artificial Sequence
  mRNA Design i-3 (hSL-A64-N5) comprising derived and/or modified sequence from Pf(3D7)__XP_001351122.1__HsALB_Pf-CSP(19-272)_L(AAY)_Pf-CSP(346-3 75)_L(AAY)_Pf-CSP(310-327)_L(AAY)_PADRE (opt3)
aggagaaagcuuaccaugaagugggugaccuucaucagccugcucuuucuuuucuccucugccuacucacuguuucaggaguaucaaugcuacggcaguagcuccaacacaagagucuugaaugaauuaaacuaugacaaugcugggacuaaccuguacaaugagcuagaaaugaacuauuacggaaaacaggagaauugguauucucucaagaaaaacucgaggucacugggugaaaaugaugacggcaacaaugaggauaacgagaaacuucggaagcccaagcacaagaaacugaagcagccugcagacgggaauccagauccgaacgccaaucccaacguugacccuaacgcgaauccaaacguggaucccaaugcuaacccuaauguagacccaaacgccaaucccaacgcaaauccuaacgccaauccaaacgcuaauccgaacgcaaaucccaacgccaacccuaaugcuaacccaaaugccaaccccaaugcgaacccuaaugcaaacccaaaugccaaccccaaugcuaacccgaaugccaacccuaaugcaaaccccaacgcuaauccaaacgccaauccuaacgcgaaucccaacguggauccaaaugccaaccccaaugcaaacccuaaugcuaacccaaaugccaacccgaaugcuaaccccaacgccaauccuaacgcaaauccaaacgccaaucccaacgcuaauccuaacgcgaauccaaacgcaaaucccaacgccaauccgaacgcuaauccuaacgccaauccaaacgcaaaccccaaugccaacccuaaugcuaaccccaaugccaacccagcagcguacauuaaaccuggaagcgcuaauaagcccaaagacgaauuggauuacgccaacgacauagagaagaagaucuguaaaauggaaaagugcagugcagccuaugagccauccgauaaacauauuaaggaguaccucaauaaaauccagaacucucuggcugccuaugcaaaguucgucgcugccuggacgcugaaagcggccgcuugaggacuaguuauaagacugacuagcccgaugggccucccaacgggcccuccuccccuccuugcaccgagauuaaucaaaggcucuuuucagagccaccaaaaaaaaaaaaaaaaaaaaaaaaaaaaaaaaaaaaaaaaaaaaaaaaaaaaaaaaaaaaaaaaagaauu

SEQ ID NO: 9417 - RNA, 1211 nt, Artificial Sequence
  mRNA Design i-3 (hSL-A64-N5) comprising derived and/or modified sequence from Pf(3D7)__XP_001351122.1__HsALB_Pf-CSP(19-272)_L(AAY)_Pf-CSP(310-3 27)_L(AAY)_Pf-CSP(346-375)_L(AAY)_PADRE (opt3)
aggagaaagcuuaccaugaagugggugaccuucaucagccugcucuuucuuuucuccucugccuacucacuguuucaggaguaucaaugcuacggcaguagcuccaacacaagagucuugaaugaauuaaacuaugacaaugcugggacuaaccuguacaaugagcuagaaaugaacuauuacggaaaacaggagaauugguauucucucaagaaaaacucgaggucacugggugaaaaugaugacggcaacaaugaggauaacgagaaacuucggaagcccaagcacaagaaacugaagcagccugcagacgggaauccagauccgaacgccaaucccaacguugacccuaacgcgaauccaaacguggaucccaaugcuaacccuaauguagacccaaacgccaaucccaacgcaaauccuaacgccaauccaaacgcuaauccgaacgcaaaucccaacgccaacccuaaugcuaacccaaaugccaaccccaaugcgaacccuaaugcaaacccaaaugccaaccccaaugcuaacccgaaugccaacccuaaugcaaaccccaacgcuaauccaaacgccaauccuaacgcgaaucccaacguggauccaaaugccaaccccaaugcaaacccuaaugcuaacccaaaugccaacccgaaugcuaaccccaacgccaauccuaacgcaaauccaaacgccaaucccaacgcuaauccuaacgcgaauccaaacgcaaaucccaacgccaauccgaacgcuaauccuaacgccaauccaaacgcaaaccccaaugccaacccuaaugcuaaccccaaugccaacccagcagcguacgaaccuagcgacaaacauauuaaggaguacuugaauaaaauacagaacagucucgcugccuauaucaagcccggauccgcaaauaagccaaaagaugaacuggacuacgccaacgauauugagaagaaaaucuguaagauggagaaaugcucugcugccuaugcaaaguucgucgcugccuggacgcugaaagcggccgcuugaggacuaguuauaagacugacuagcccgaugggccucccaacgggcccuccuccccuccuugcaccgagauuaaucaaaggcucuuuucagagccaccaaaaaaaaaaaaaaaaaaaaaaaaaaaaaaaaaaaaaaaaaaaaaaaaaaaaaaaaaaaaaaaaagaauu

SEQ ID NO: 9418 - RNA, 1265 nt, Artificial Sequence
  mRNA Design i-3 (hSL-A64-N5) comprising derived and/or modified sequence from Pf(3D7)__XP_001351122.1__HsALB_Pf-CSP(19-272)_L(AAY)_Pf-CSP(310-3 27)_L(AAY)_Pf-CSP(346-375)_L(AAY)_PADRE_L(AAY)_P2 (opt3)
aggagaaagcuuaccaugaagugggugaccuucaucagccugcucuuucuuuucuccucugccuacucacuguuucaggaguaucaaugcuacggcaguagcuccaacacaagagucuugaaugaauuaaacuaugacaaugcugggacuaaccuguacaaugagcuagaaaugaacuauuacggaaaacaggagaauugguauucucucaagaaaaacucgaggucacugggugaaaaugaugacggcaacaaugaggauaacgagaaacuucggaagcccaagcacaagaaacugaagcagccugcagacgggaauccagauccgaacgccaaucccaacguugacccuaacgcgaauccaaacguggaucccaaugcuaacccuaauguagacccaaacgccaaucccaacgcaaauccuaacgccaauccaaacgcuaauccgaacgcaaaucccaacgccaacccuaaugcuaacccaaaugccaaccccaaugcgaacccuaaugcaaacccaaaugccaaccccaaugcuaacccgaaugccaacccuaaugcaaaccccaacgcuaauccaaacgccaauccuaacgcgaaucccaacguggauccaaaugccaaccccaaugcaaacccuaaugcuaacccaaaugccaacccgaaugcuaaccccaacgccaauccuaacgcaaauccaaacgccaaucccaacgcuaauccuaacgcgaauccaaacgcaaaucccaacgccaauccgaacgcuaauccuaacgccaauccaaacgcaaaccccaaugccaacccuaaugcuaaccccaaugccaacccagcagcguacgaaccuagcgacaaacauauuaaggaguacuugaauaaaauacagaacagucucgcugccuauaucaagcccggauccgcaaauaagccaaaagaugaacuggacuacgccaacgauauugagaagaaaaucuguaagauggagaaaugcucugcugccuaugcaaaguucgucgcugccuggacgcugaaagcggccgcugcagccuaccaauauauuaaggcuaauagcaaguuuaucggcauaaccgaacucugaggacuaguuauaagacugacuagcccgaugggccucccaacgggcccuccuccccuccuugcaccgagauuaaucaaaggcucuuuucagagccaccaaaaaaaaaaaaaaaaaaaaaaaaaaaaaaaaaaaaaaaaaaaaaaaaaaaaaaaaaaaaaaaaagaauu

SEQ ID NO: 9419 - RNA, 1229 nt, Artificial Sequence
  mRNA Design i-3 (hSL-A64-N5) comprising derived and/or modified sequence from Pf(3D7)__XP_001351122.1__HsALB_Pf-CSP(19-272)_L(AAY)_Pf-CSP(310-3 27)_Linker (AAY)_Pf-CSP(346-397) (opt3)
aggagaaagcuuaccaugaagugggugaccuucaucagccugcucuuucuuuucuccucugccuacucacuguuucaggaguaucaaugcuacggcaguagcuccaacacaagagucuugaaugaauuaaacuaugacaaugcugggacuaaccuguacaaugagcuagaaaugaacuauuacggaaaacaggagaauugguauucucucaagaaaaacucgaggucacugggugaaaaugaugacggcaacaaugaggauaacgagaaguuacggaaacccaagcacaagaaacugaagcagccugcagacgggaauccagauccgaacgccaaucccaacguugacccuaacgcgaauccaaacguggaucccaaugcuaacccuaauguagacccaaacgccaaucccaacgcaaauccuaacgccaauccaaacgcuaauccgaacgcaaaucccaacgccaacccuaaugcuaacccaaaugccaaccccaaugcgaacccuaaugcaaacccaaaugccaaccccaaugcuaacccgaaugccaacccuaaugcaaaccccaacgcuaauccaaacgccaauccuaacgcgaaucccaacguggauccaaaugccaaccccaaugcaaacccuaaugcuaacccaaaugccaacccgaaugcuaaccccaacgccaauccuaacgcaaauccaaacgccaaucccaacgcuaauccuaacgcgaauccaaacgcaaaucccaacgccaauccgaacgcuaauccuaacgccaauccaaacgcaaaccccaaugccaacccuaaugcuaaccccaaugccaacccagcagcguacgaaccuagcgacaaacauauuaaggaguacuugaauaaaauacagaacagucucgcugccuauaucaagcccggauccgcaaauaagccaaaagaugaacuggacuacgccaacgauauugagaagaaaaucuguaagauggagaaaugcucuagcgucuucaaugugguuaacuccucaauuggccugaucauggugcucaguuuucuuuuccugaauugaggacuaguuauaagacugacuagcccgaugggccucccaacgggcccuccuccccuccuugcaccgagauuaaucaaaggcucuuuucagagccaccaaaaaaaaaaaaaaaaaaaaaaaaaaaaaaaaaaaaaaaaaaaaaaaaaaaaaaaaaaaaaaaaagaauu

SEQ ID NO: 9420 - RNA, 1829 nt, Artificial Sequence
  mRNA Design i-3 (hSL-A64-N5) comprising derived and/or modified sequence from Pf(3D7)__XP_001351122.1__LumSynt_L(GGS4-GGG)_Pf-CSP(19-397) (opt4)
aggagaaagcuuaccaugcagaucuacgagggcaagcugaccgccgagggccugagauucggcaucguggccagcagauucaaccacgcccugguggacagacugguggagggcgccaucgacgccaucgugagacacggcggcagagaggaggacaucacccuggugagagugcccggcagcugggagauccccguggccgccggcgagcuggccagaaaggaggacaucgacgccgugaucgccaucggcgugcugaucagaggcgccaccccccacuucgacuacaucgccagcgaggugagcaagggccuggccgaccugagccuggagcugagaaagcccaucaccuucggcgugaucaccgccgacacccuggagcaggccaucgagagagccggcaccaagcacggcaacaagggcugggaggccgcccugagcgccaucgagauggccaaccuguucaagagccugagaggcggcagcggcggcagcggcggcagcggcggcagcggcggcggccuguuccaggaguaccagugcuacggcagcagcagcaacaccagagugcugaacgagcugaacuacgacaacgccggcaccaaccuguacaacgagcuggagaugaacuacuacggcaagcaggagaacugguacagccugaagaagaacagcagaagccugggcgagaacgacgacggcaacaacgaggacaacgagaagcugagaaagcccaagcacaagaagcugaagcagcccgccgacggcaaccccgaccccaacgccaaccccaacguggaccccaacgccaaccccaacguggaccccaacgccaaccccaacguggaccccaacgccaaccccaacgccaaccccaacgccaaccccaacgccaaccccaacgccaaccccaacgccaaccccaacgccaaccccaacgccaaccccaacgccaaccccaacgccaaccccaacgccaaccccaacgccaaccccaacgccaaccccaacgccaaccccaacgccaaccccaacgccaaccccaacgccaaccccaacguggaccccaacgccaaccccaacgccaaccccaacgccaaccccaacgccaaccccaacgccaaccccaacgccaaccccaacgccaaccccaacgccaaccccaacgccaaccccaacgccaaccccaacgccaaccccaacgccaaccccaacgccaaccccaacgccaaccccaacgccaaccccaacgccaaccccaacgccaaccccaacgccaaccccaacaagaacaaccagggcaacggccagggccacaacaugcccaacgaccccaacagaaacguggacgagaacgccaacgccaacagcgccgugaagaacaacaacaacgaggagcccagcgacaagcacaucaaggaguaccugaacaagauccagaacagccugagcaccgaguggagccccugcagcgugaccugcggcaacggcauccaggugagaaucaagcccggcagcgccaacaagcccaaggacgagcuggacuacgccaacgacaucgagaagaagaucugcaagauggagaagugcagcagcguguucaacguggugaacagcagcaucggccugaucauggugcugagcuuccuguuccugaacugaggacuaguuauaagacugacuagcccgaugggccucccaacgggcccuccuccccuccuugcaccgagauuaaucaaaggcucuuuucagagccaccaaaaaaaaaaaaaaaaaaaaaaaaaaaaaaaaaaaaaaaaaaaaaaaaaaaaaaaaaaaaaaaaagaauu

SEQ ID NO: 9421 - RNA, 1691 nt, Artificial Sequence
  mRNA Design i-3 (hSL-A64-N5) comprising derived and/or modified sequence from Pf(3D7)__XP_001351122.1__HsALB_Pf-CSP(19-272)_L(PVTN)_HBsAg (opt4)
aggagaaagcuuaccaugaagugggugaccuucaucagccugcuguuccuguucagcagcgccuacagccuguuccaggaguaccagugcuacggcagcagcagcaacaccagagugcugaacgagcugaacuacgacaacgccggcaccaaccuguacaacgagcuggagaugaacuacuacggcaagcaggagaacugguacagccugaagaagaacagcagaagccugggcgagaacgacgacggcaacaacgaggacaacgagaagcugagaaagcccaagcacaagaagcugaagcagcccgccgacggcaaccccgaccccaacgccaaccccaacguggaccccaacgccaaccccaacguggaccccaacgccaaccccaacguggaccccaacgccaaccccaacgccaaccccaacgccaaccccaacgccaaccccaacgccaaccccaacgccaaccccaacgccaaccccaacgccaaccccaacgccaaccccaacgccaaccccaacgccaaccccaacgccaaccccaacgccaaccccaacgccaaccccaacgccaaccccaacgccaaccccaacgccaaccccaacguggaccccaacgccaaccccaacgccaaccccaacgccaaccccaacgccaaccccaacgccaaccccaacgccaaccccaacgccaaccccaacgccaaccccaacgccaaccccaacgccaaccccaacgccaaccccaacgccaaccccaacgccaaccccaacgccaaccccaacgccaaccccaacgccaaccccaacgccaaccccaacgccaacccccccgugaccaacauggagaacaucaccagcggcuuccugggcccccugcuggugcugcaggccggcuucuuccugcugaccagaauccugaccaucccccagagccuggacagcugguggaccagccugaacuuccugggcggcagccccgugugccugggccagaacagccagagccccaccagcaaccacagccccaccagcugcccccccaucugccccggcuacagauggaugugccugagaagauucaucaucuuccuguucauccugcugcugugccugaucuuccugcuggugcugcuggacuaccagggcaugcugcccgugugcccccugauccccggcagcaccaccaccaacaccggccccugcaagaccugcaccacccccgcccagggcaacagcauguuccccagcugcugcugcaccaagcccaccgacggcaacugcaccugcauccccauccccagcagcugggccuucgccaaguaccugugggagugggccagcgugagauucagcuggcugagccugcuggugcccuucgugcagugguucgugggccugagccccaccguguggcugagcgccaucuggaugaugugguacuggggccccagccuguacagcaucgugagccccuucaucccccugcugcccaucuucuucugccuguggguguacaucugaggacuaguuauaagacugacuagcccgaugggccucccaacgggcccuccuccccuccuugcaccgagauuaaucaaaggcucuuuucagagccaccaaaaaaaaaaaaaaaaaaaaaaaaaaaaaaaaaaaaaaaaaaaaaaaaaaaaaaaaaaaaaaaaagaauu

SEQ ID NO: 9422 - RNA, 1808 nt, Artificial Sequence
  mRNA Design i-3 (hSL-A64-N5) comprising derived and/or modified sequence from Pf(3D7)__XP_001351122.1__HsALB_Pf-CSP(19-272)_L(AAY)_Pf-CSP(346-3 65)_L(AAY)_PADRE_L(PVTN)_HBsAg (opt4)
aggagaaagcuuaccaugaagugggugaccuucaucagccugcuguuccuguucagcagcgccuacagccuguuccaggaguaccagugcuacggcagcagcagcaacaccagagugcugaacgagcugaacuacgacaacgccggcaccaaccuguacaacgagcuggagaugaacuacuacggcaagcaggagaacugguacagccugaagaagaacagcagaagccugggcgagaacgacgacggcaacaacgaggacaacgagaagcugagaaagcccaagcacaagaagcugaagcagcccgccgacggcaaccccgaccccaacgccaaccccaacguggaccccaacgccaaccccaacguggaccccaacgccaaccccaacguggaccccaacgccaaccccaacgccaaccccaacgccaaccccaacgccaaccccaacgccaaccccaacgccaaccccaacgccaaccccaacgccaaccccaacgccaaccccaacgccaaccccaacgccaaccccaacgccaaccccaacgccaaccccaacgccaaccccaacgccaaccccaacgccaaccccaacgccaaccccaacguggaccccaacgccaaccccaacgccaaccccaacgccaaccccaacgccaaccccaacgccaaccccaacgccaaccccaacgccaaccccaacgccaaccccaacgccaaccccaacgccaaccccaacgccaaccccaacgccaaccccaacgccaaccccaacgccaaccccaacgccaaccccaacgccaaccccaacgccaaccccaacgccaaccccgccgccuacaucaagcccggcagcgccaacaagcccaaggacgagcuggacuacgccaacgacaucgaggccgccuacgccaaguucguggccgccuggacccugaaggccgccgcccccgugaccaacauggagaacaucaccagcggcuuccugggcccccugcuggugcugcaggccggcuucuuccugcugaccagaauccugaccaucccccagagccuggacagcugguggaccagccugaacuuccugggcggcagccccgugugccugggccagaacagccagagccccaccagcaaccacagccccaccagcugcccccccaucugccccggcuacagauggaugugccugagaagauucaucaucuuccuguucauccugcugcugugccugaucuuccugcuggugcugcuggacuaccagggcaugcugcccgugugcccccugauccccggcagcaccaccaccaacaccggccccugcaagaccugcaccacccccgcccagggcaacagcauguuccccagcugcugcugcaccaagcccaccgacggcaacugcaccugcauccccauccccagcagcugggccuucgccaaguaccugugggagugggccagcgugagauucagcuggcugagccugcuggugcccuucgugcagugguucgugggccugagccccaccguguggcugagcgccaucuggaugaugugguacuggggccccagccuguacagcaucgugagccccuucaucccccugcugcccaucuucuucugccuguggguguacaucugaggacuaguuauaagacugacuagcccgaugggccucccaacgggcccuccuccccuccuugcaccgagauuaaucaaaggcucuuuucagagccaccaaaaaaaaaaaaaaaaaaaaaaaaaaaaaaaaaaaaaaaaaaaaaaaaaaaaaaaaaaaaaaaaagaauu

SEQ ID NO: 9423 - RNA, 2027 nt, Artificial Sequence
  mRNA Design i-3 (hSL-A64-N5) comprising derived and/or modified sequence from Pf(3D7)__XP_001351122.1__HsALB_Pf-CSP(19-384)_L(PVTN)_HBsAg (opt4)
aggagaaagcuuaccaugaagugggugaccuucaucagccugcuguuccuguucagcagcgccuacagccuguuccaggaguaccagugcuacggcagcagcagcaacaccagagugcugaacgagcugaacuacgacaacgccggcaccaaccuguacaacgagcuggagaugaacuacuacggcaagcaggagaacugguacagccugaagaagaacagcagaagccugggcgagaacgacgacggcaacaacgaggacaacgagaagcugagaaagcccaagcacaagaagcugaagcagcccgccgacggcaaccccgaccccaacgccaaccccaacguggaccccaacgccaaccccaacguggaccccaacgccaaccccaacguggaccccaacgccaaccccaacgccaaccccaacgccaaccccaacgccaaccccaacgccaaccccaacgccaaccccaacgccaaccccaacgccaaccccaacgccaaccccaacgccaaccccaacgccaaccccaacgccaaccccaacgccaaccccaacgccaaccccaacgccaaccccaacgccaaccccaacgccaaccccaacguggaccccaacgccaaccccaacgccaaccccaacgccaaccccaacgccaaccccaacgccaaccccaacgccaaccccaacgccaaccccaacgccaaccccaacgccaaccccaacgccaaccccaacgccaaccccaacgccaaccccaacgccaaccccaacgccaaccccaacgccaaccccaacgccaaccccaacgccaaccccaacgccaaccccaacaagaacaaccagggcaacggccagggccacaacaugcccaacgaccccaacagaaacguggacgagaacgccaacgccaacagcgccgugaagaacaacaacaacgaggagcccagcgacaagcacaucaaggaguaccugaacaagauccagaacagccugagcaccgaguggagccccugcagcgugaccugcggcaacggcauccaggugagaaucaagcccggcagcgccaacaagcccaaggacgagcuggacuacgccaacgacaucgagaagaagaucugcaagauggagaagugcagcagcguguucaacguggugaacagcagccccgugaccaacauggagaacaucaccagcggcuuccugggcccccugcuggugcugcaggccggcuucuuccugcugaccagaauccugaccaucccccagagccuggacagcugguggaccagccugaacuuccugggcggcagccccgugugccugggccagaacagccagagccccaccagcaaccacagccccaccagcugcccccccaucugccccggcuacagauggaugugccugagaagauucaucaucuuccuguucauccugcugcugugccugaucuuccugcuggugcugcuggacuaccagggcaugcugcccgugugcccccugauccccggcagcaccaccaccaacaccggccccugcaagaccugcaccacccccgcccagggcaacagcauguuccccagcugcugcugcaccaagcccaccgacggcaacugcaccugcauccccauccccagcagcugggccuucgccaaguaccugugggagugggccagcgugagauucagcuggcugagccugcuggugcccuucgugcagugguucgugggccugagccccaccguguggcugagcgccaucuggaugaugugguacuggggccccagccuguacagcaucgugagccccuucaucccccugcugcccaucuucuucugccuguggguguacaucugaggacuaguuauaagacugacuagcccgaugggccucccaacgggcccuccuccccuccuugcaccgagauuaaucaaaggcucuuuucagagccaccaaaaaaaaaaaaaaaaaaaaaaaaaaaaaaaaaaaaaaaaaaaaaaaaaaaaaaaaaaaaaaaaagaauu

SEQ ID NO: 9424 - RNA, 1844 nt, Artificial Sequence
  mRNA Design i-3 (hSL-A64-N5) comprising derived and/or modified sequence from Pf(3D7)__XP_001351122.1__HsALB_Pf-CSP(19-384)_L(SGG)_Ferritin (opt4)
aggagaaagcuuaccaugaagugggugaccuucaucagccugcuguuccuguucagcagcgccuacagccuguuccaggaguaccagugcuacggcagcagcagcaacaccagagugcugaacgagcugaacuacgacaacgccggcaccaaccuguacaacgagcuggagaugaacuacuacggcaagcaggagaacugguacagccugaagaagaacagcagaagccugggcgagaacgacgacggcaacaacgaggacaacgagaagcugagaaagcccaagcacaagaagcugaagcagcccgccgacggcaaccccgaccccaacgccaaccccaacguggaccccaacgccaaccccaacguggaccccaacgccaaccccaacguggaccccaacgccaaccccaacgccaaccccaacgccaaccccaacgccaaccccaacgccaaccccaacgccaaccccaacgccaaccccaacgccaaccccaacgccaaccccaacgccaaccccaacgccaaccccaacgccaaccccaacgccaaccccaacgccaaccccaacgccaaccccaacgccaaccccaacgccaaccccaacguggaccccaacgccaaccccaacgccaaccccaacgccaaccccaacgccaaccccaacgccaaccccaacgccaaccccaacgccaaccccaacgccaaccccaacgccaaccccaacgccaaccccaacgccaaccccaacgccaaccccaacgccaaccccaacgccaaccccaacgccaaccccaacgccaaccccaacgccaaccccaacgccaaccccaacaagaacaaccagggcaacggccagggccacaacaugcccaacgaccccaacagaaacguggacgagaacgccaacgccaacagcgccgugaagaacaacaacaacgaggagcccagcgacaagcacaucaaggaguaccugaacaagauccagaacagccugagcaccgaguggagccccugcagcgugaccugcggcaacggcauccaggugagaaucaagcccggcagcgccaacaagcccaaggacgagcuggacuacgccaacgacaucgagaagaagaucugcaagauggagaagugcagcagcguguucaacguggugaacagcagcagcggcggccugagcaaggacaucaucaagcugcugaacgagcaggugaacaaggagaugaacagcagcaaccuguacaugagcaugagcagcuggugcuacacccacagccuggacggcgccggccuguuccuguucgaccacgccgccgaggaguacgagcacgccaagaagcugaucaucuuccugaacgagaacaacgugcccgugcagcugaccagcaucagcgcccccgagcacaaguucgagggccugacccagaucuuccagaaggccuacgagcacgagcagcacaucagcgagagcaucaacaacaucguggaccacgccaucaagagcaaggaccacgccaccuucaacuuccugcagugguacguggccgagcagcacgaggaggaggugcuguucaaggacauccuggacaagaucgagcugaucggcaacgagaaccacggccuguaccuggccgaccaguacgugaagggcaucgccaagagcagaaagagcugaggacuaguuauaagacugacuagcccgaugggccucccaacgggcccuccuccccuccuugcaccgagauuaaucaaaggcucuuuucagagccaccaaaaaaaaaaaaaaaaaaaaaaaaaaaaaaaaaaaaaaaaaaaaaaaaaaaaaaaaaaaaaaaaagaauu

SEQ ID NO: 9425 - RNA, 1805 nt, Artificial Sequence
  mRNA Design i-3 (hSL-A64-N5) comprising derived and/or modified sequence from Pf(3D7)__XP_001351122.1__HsALB_Pf-CSP(93-384)_L(PVTN)_HBsAg (opt4)
aggagaaagcuuaccaugaagugggugaccuucaucagccugcuguuccuguucagcagcgccuacagcaagcugaagcagcccgccgacggcaaccccgaccccaacgccaaccccaacguggaccccaacgccaaccccaacguggaccccaacgccaaccccaacguggaccccaacgccaaccccaacgccaaccccaacgccaaccccaacgccaaccccaacgccaaccccaacgccaaccccaacgccaaccccaacgccaaccccaacgccaaccccaacgccaaccccaacgccaaccccaacgccaaccccaacgccaaccccaacgccaaccccaacgccaaccccaacgccaaccccaacgccaaccccaacguggaccccaacgccaaccccaacgccaaccccaacgccaaccccaacgccaaccccaacgccaaccccaacgccaaccccaacgccaaccccaacgccaaccccaacgccaaccccaacgccaaccccaacgccaaccccaacgccaaccccaacgccaaccccaacgccaaccccaacgccaaccccaacgccaaccccaacgccaaccccaacgccaaccccaacaagaacaaccagggcaacggccagggccacaacaugcccaacgaccccaacagaaacguggacgagaacgccaacgccaacagcgccgugaagaacaacaacaacgaggagcccagcgacaagcacaucaaggaguaccugaacaagauccagaacagccugagcaccgaguggagccccugcagcgugaccugcggcaacggcauccaggugagaaucaagcccggcagcgccaacaagcccaaggacgagcuggacuacgccaacgacaucgagaagaagaucugcaagauggagaagugcagcagcguguucaacguggugaacagcagccccgugaccaacauggagaacaucaccagcggcuuccugggcccccugcuggugcugcaggccggcuucuuccugcugaccagaauccugaccaucccccagagccuggacagcugguggaccagccugaacuuccugggcggcagccccgugugccugggccagaacagccagagccccaccagcaaccacagccccaccagcugcccccccaucugccccggcuacagauggaugugccugagaagauucaucaucuuccuguucauccugcugcugugccugaucuuccugcuggugcugcuggacuaccagggcaugcugcccgugugcccccugauccccggcagcaccaccaccaacaccggccccugcaagaccugcaccacccccgcccagggcaacagcauguuccccagcugcugcugcaccaagcccaccgacggcaacugcaccugcauccccauccccagcagcugggccuucgccaaguaccugugggagugggccagcgugagauucagcuggcugagccugcuggugcccuucgugcagugguucgugggccugagccccaccguguggcugagcgccaucuggaugaugugguacuggggccccagccuguacagcaucgugagccccuucaucccccugcugcccaucuucuucugccuguggguguacaucugaggacuaguuauaagacugacuagcccgaugggccucccaacgggcccuccuccccuccuugcaccgagauuaaucaaaggcucuuuucagagccaccaaaaaaaaaaaaaaaaaaaaaaaaaaaaaaaaaaaaaaaaaaaaaaaaaaaaaaaaaaaaaaaaagaauu

SEQ ID NO: 9426 - RNA, 1466 nt, Artificial Sequence; identical to SEQ ID NO: 7193
  mRNA Design i-3 (hSL-A64-N5) comprising derived and/or modified sequence from Pf(3D7)__XP_001351122.1__HsALB_Pf-CSP(199-377)_L(PVTN)_HBsAg (opt4)

SEQ ID NO: 9427 - RNA, 1163 nt, Artificial Sequence
  mRNA Design i-3 (hSL-A64-N5) comprising derived and/or modified sequence from Pf(3D7)__XP_001351122.1__HsALB_Pf-CSP(19-272)_L(AAY)_Pf-CSP(346-3 75)_L(AAY)_Pf-CSP(310-327) (opt4)
aggagaaagcuuaccaugaagugggugaccuucaucagccugcuguuccuguucagcagcgccuacagccuguuccaggaguaccagugcuacggcagcagcagcaacaccagagugcugaacgagcugaacuacgacaacgccggcaccaaccuguacaacgagcuggagaugaacuacuacggcaagcaggagaacugguacagccugaagaagaacagcagaagccugggcgagaacgacgacggcaacaacgaggacaacgagaagcugagaaagcccaagcacaagaagcugaagcagcccgccgacggcaaccccgaccccaacgccaaccccaacguggaccccaacgccaaccccaacguggaccccaacgccaaccccaacguggaccccaacgccaaccccaacgccaaccccaacgccaaccccaacgccaaccccaacgccaaccccaacgccaaccccaacgccaaccccaacgccaaccccaacgccaaccccaacgccaaccccaacgccaaccccaacgccaaccccaacgccaaccccaacgccaaccccaacgccaaccccaacgccaaccccaacgccaaccccaacguggaccccaacgccaaccccaacgccaaccccaacgccaaccccaacgccaaccccaacgccaaccccaacgccaaccccaacgccaaccccaacgccaaccccaacgccaaccccaacgccaaccccaacgccaaccccaacgccaaccccaacgccaaccccaacgccaaccccaacgccaaccccaacgccaaccccaacgccaaccccaacgccaaccccgccgccuacaucaagcccggcagcgccaacaagcccaaggacgagcuggacuacgccaacgacaucgagaagaagaucugcaagauggagaagugcagcgccgccuacgagcccagcgacaagcacaucaaggaguaccugaacaagauccagaacagccugugaggacuaguuauaagacugacuagcccgaugggccucccaacgggcccuccuccccuccuugcaccgagauuaaucaaaggcucuuuucagagccaccaaaaaaaaaaaaaaaaaaaaaaaaaaaaaaaaaaaaaaaaaaaaaaaaaaaaaaaaaaaaaaaaagaauu

SEQ ID NO: 9428 - RNA, 1211 nt, Artificial Sequence
  mRNA Design i-3 (hSL-A64-N5) comprising derived and/or modified sequence from Pf(3D7)__XP_001351122.1__HsALB_Pf-CSP(19-272)_L(AAY)_Pf-CSP(346-3 75)_L(AAY)_Pf-CSP(310-327)_L(AAY)_PADRE (opt4)
aggagaaagcuuaccaugaagugggugaccuucaucagccugcuguuccuguucagcagcgccuacagccuguuccaggaguaccagugcuacggcagcagcagcaacaccagagugcugaacgagcugaacuacgacaacgccggcaccaaccuguacaacgagcuggagaugaacuacuacggcaagcaggagaacugguacagccugaagaagaacagcagaagccugggcgagaacgacgacggcaacaacgaggacaacgagaagcugagaaagcccaagcacaagaagcugaagcagcccgccgacggcaaccccgaccccaacgccaaccccaacguggaccccaacgccaaccccaacguggaccccaacgccaaccccaacguggaccccaacgccaaccccaacgccaaccccaacgccaaccccaacgccaaccccaacgccaaccccaacgccaaccccaacgccaaccccaacgccaaccccaacgccaaccccaacgccaaccccaacgccaaccccaacgccaaccccaacgccaaccccaacgccaaccccaacgccaaccccaacgccaaccccaacgccaaccccaacguggaccccaacgccaaccccaacgccaaccccaacgccaaccccaacgccaaccccaacgccaaccccaacgccaaccccaacgccaaccccaacgccaaccccaacgccaaccccaacgccaaccccaacgccaaccccaacgccaaccccaacgccaaccccaacgccaaccccaacgccaaccccaacgccaaccccaacgccaaccccaacgccaaccccgccgccuacaucaagcccggcagcgccaacaagcccaaggacgagcuggacuacgccaacgacaucgagaagaagaucugcaagauggagaagugcagcgccgccuacgagcccagcgacaagcacaucaaggaguaccugaacaagauccagaacagccuggccgccuacgccaaguucguggccgccuggacccugaaggccgccgccugaggacuaguuauaagacugacuagcccgaugggccucccaacgggcccuccuccccuccuugcaccgagauuaaucaaaggcucuuuucagagccaccaaaaaaaaaaaaaaaaaaaaaaaaaaaaaaaaaaaaaaaaaaaaaaaaaaaaaaaaaaaaaaaaagaauu

SEQ ID NO: 9429 - RNA, 1211 nt, Artificial Sequence
  mRNA Design i-3 (hSL-A64-N5) comprising derived and/or modified sequence from Pf(3D7)__XP_001351122.1__HsALB_Pf-CSP(19-272)_L(AAY)_Pf-CSP(310-3 27)_L(AAY)_Pf-CSP(346-375)_L(AAY)_PADRE (opt4)
aggagaaagcuuaccaugaagugggugaccuucaucagccugcuguuccuguucagcagcgccuacagccuguuccaggaguaccagugcuacggcagcagcagcaacaccagagugcugaacgagcugaacuacgacaacgccggcaccaaccuguacaacgagcuggagaugaacuacuacggcaagcaggagaacugguacagccugaagaagaacagcagaagccugggcgagaacgacgacggcaacaacgaggacaacgagaagcugagaaagcccaagcacaagaagcugaagcagcccgccgacggcaaccccgaccccaacgccaaccccaacguggaccccaacgccaaccccaacguggaccccaacgccaaccccaacguggaccccaacgccaaccccaacgccaaccccaacgccaaccccaacgccaaccccaacgccaaccccaacgccaaccccaacgccaaccccaacgccaaccccaacgccaaccccaacgccaaccccaacgccaaccccaacgccaaccccaacgccaaccccaacgccaaccccaacgccaaccccaacgccaaccccaacgccaaccccaacguggaccccaacgccaaccccaacgccaaccccaacgccaaccccaacgccaaccccaacgccaaccccaacgccaaccccaacgccaaccccaacgccaaccccaacgccaaccccaacgccaaccccaacgccaaccccaacgccaaccccaacgccaaccccaacgccaaccccaacgccaaccccaacgccaaccccaacgccaaccccaacgccaaccccgccgccuacgagcccagcgacaagcacaucaaggaguaccugaacaagauccagaacagccuggccgccuacaucaagcccggcagcgccaacaagcccaaggacgagcuggacuacgccaacgacaucgagaagaagaucugcaagauggagaagugcagcgccgccuacgccaaguucguggccgccuggacccugaaggccgccgccugaggacuaguuauaagacugacuagcccgaugggccucccaacgggcccuccuccccuccuugcaccgagauuaaucaaaggcucuuuucagagccaccaaaaaaaaaaaaaaaaaaaaaaaaaaaaaaaaaaaaaaaaaaaaaaaaaaaaaaaaaaaaaaaaagaauu

SEQ ID NO: 9430 - RNA, 1265 nt, Artificial Sequence
  mRNA Design i-3 (hSL-A64-N5) comprising derived and/or modified sequence from Pf(3D7)__XP_001351122.1__HsALB_Pf-CSP(19-272)_L(AAY)_Pf-CSP(310-3 27)_L(AAY)_Pf-CSP(346-375)_L(AAY)_PADRE_L(AAY)_P2 (opt4)
aggagaaagcuuaccaugaagugggugaccuucaucagccugcuguuccuguucagcagcgccuacagccuguuccaggaguaccagugcuacggcagcagcagcaacaccagagugcugaacgagcugaacuacgacaacgccggcaccaaccuguacaacgagcuggagaugaacuacuacggcaagcaggagaacugguacagccugaagaagaacagcagaagccugggcgagaacgacgacggcaacaacgaggacaacgagaagcugagaaagcccaagcacaagaagcugaagcagcccgccgacggcaaccccgaccccaacgccaaccccaacguggaccccaacgccaaccccaacguggaccccaacgccaaccccaacguggaccccaacgccaaccccaacgccaaccccaacgccaaccccaacgccaaccccaacgccaaccccaacgccaaccccaacgccaaccccaacgccaaccccaacgccaaccccaacgccaaccccaacgccaaccccaacgccaaccccaacgccaaccccaacgccaaccccaacgccaaccccaacgccaaccccaacgccaaccccaacguggaccccaacgccaaccccaacgccaaccccaacgccaaccccaacgccaaccccaacgccaaccccaacgccaaccccaacgccaaccccaacgccaaccccaacgccaaccccaacgccaaccccaacgccaaccccaacgccaaccccaacgccaaccccaacgccaaccccaacgccaaccccaacgccaaccccaacgccaaccccaacgccaaccccgccgccuacgagcccagcgacaagcacaucaaggaguaccugaacaagauccagaacagccuggccgccuacaucaagcccggcagcgccaacaagcccaaggacgagcuggacuacgccaacgacaucgagaagaagaucugcaagauggagaagugcagcgccgccuacgccaaguucguggccgccuggacccugaaggccgccgccgccgccuaccaguacaucaaggccaacagcaaguucaucggcaucaccgagcugugaggacuaguuauaagacugacuagcccgaugggccucccaacgggcccuccuccccuccuugcaccgagauuaaucaaaggcucuuuucagagccaccaaaaaaaaaaaaaaaaaaaaaaaaaaaaaaaaaaaaaaaaaaaaaaaaaaaaaaaaaaaaaaaaagaauu

SEQ ID NO: 9431 - RNA, 1229 nt, Artificial Sequence
  mRNA Design i-3 (hSL-A64-N5) comprising derived and/or modified sequence from Pf(3D7)__XP_001351122.1__HsALB_Pf-CSP(19-272)_L(AAY)_Pf-CSP(310-3 27)_Linker (AAY)_Pf-CSP(346-397) (opt4)
aggagaaagcuuaccaugaagugggugaccuucaucagccugcuguuccuguucagcagcgccuacagccuguuccaggaguaccagugcuacggcagcagcagcaacaccagagugcugaacgagcugaacuacgacaacgccggcaccaaccuguacaacgagcuggagaugaacuacuacggcaagcaggagaacugguacagccugaagaagaacagcagaagccugggcgagaacgacgacggcaacaacgaggacaacgagaagcugagaaagcccaagcacaagaagcugaagcagcccgccgacggcaaccccgaccccaacgccaaccccaacguggaccccaacgccaaccccaacguggaccccaacgccaaccccaacguggaccccaacgccaaccccaacgccaaccccaacgccaaccccaacgccaaccccaacgccaaccccaacgccaaccccaacgccaaccccaacgccaaccccaacgccaaccccaacgccaaccccaacgccaaccccaacgccaaccccaacgccaaccccaacgccaaccccaacgccaaccccaacgccaaccccaacgccaaccccaacguggaccccaacgccaaccccaacgccaaccccaacgccaaccccaacgccaaccccaacgccaaccccaacgccaaccccaacgccaaccccaacgccaaccccaacgccaaccccaacgccaaccccaacgccaaccccaacgccaaccccaacgccaaccccaacgccaaccccaacgccaaccccaacgccaaccccaacgccaaccccaacgccaaccccgccgccuacgagcccagcgacaagcacaucaaggaguaccugaacaagauccagaacagccuggccgccuacaucaagcccggcagcgccaacaagcccaaggacgagcuggacuacgccaacgacaucgagaagaagaucugcaagauggagaagugcagcagcguguucaacguggugaacagcagcaucggccugaucauggugcugagcuuccuguuccugaacugaggacuaguuauaagacugacuagcccgaugggccucccaacgggcccuccuccccuccuugcaccgagauuaaucaaaggcucuuuucagagccaccaaaaaaaaaaaaaaaaaaaaaaaaaaaaaaaaaaaaaaaaaaaaaaaaaaaaaaaaaaaaaaaaagaauu

SEQ ID NO: 9432 - RNA, 1829 nt, Artificial Sequence
  mRNA Design i-3 (hSL-A64-N5) comprising derived and/or modified sequence from Pf(3D7)__XP_001351122.1__LumSynt_L(GGS4-GGG)_Pf-CSP(19-397) (opt5)
aggagaaagcuuaccaugcagaucuacgagggcaagcugaccgccgaagggcucagauucggaauuguggcuagccgguuuaaccacgcccuggucgaccgccuuguugagggcgcgaucgaugcuauugugagacaugggggacgggaagaggacaucacacuggugcgcguccccggcuccugggaaauuccuguggccgccggggagcucgcuagaaaagaggauaucgacgccguuaucgcuauuggagugcugauccggggcgccacgccgcacuucgauuauauugcgucugaagucagcaagggccuugccgaccugucccucgagcugcgcaaacccaucaccuuuggggugauuacagcugauacccuggaacaagccaucgagagagcuggaacaaagcauggcaauaaagggugggaggccgcgcucucugccauugaaauggcuaaccuguucaagagccuucggggaggcuccgggggaucuggcggcagcgggggauccggcgggggacuguuucaggaguaccagugcuauggcuccucuuccaauacccgcguucucaacgaacugaauuacgacaacgccgggacaaaucuuuauaacgagcuggaaaugaauuacuauggaaagcaggagaacugguacagccucaaaaagaacucuagaucccugggcgagaaugaugacggcaauaacgaagauaaugagaaacugcggaagccuaaacacaagaagcucaaacaacccgcugacgggaacccugaucccaacgccaauccuaacguggacccgaaugccaaccccaaugucgacccuaacgcuaaucccaacguggauccuaaugcgaaccccaaugccaacccgaaugcuaacccuaaugccaaccccaacgccaauccuaacgcuaaucccaacgccaaucccaacgcgaauccuaacgcuaauccgaacgccaaucccaacgccaauccuaacgcuaaucccaacgccaacccuaaugcuaaccccaaugccaacccgaaugcgaacccuaaugccaaccccaauguggacccuaacgcuaaucccaacgccaauccuaacgcuaaucccaacgccaacccgaaugcgaacccuaaugccaaccccaaugcuaaccccaaugccaacccuaaugcuaacccgaaugccaaccccaaugccaacccuaaugcuaaccccaaugcgaacccuaacgccaaucccaacgcuaauccuaacgccaaucccaacgccaauccgaacgcuaauccuaacaagaauaaccagggaaauggccaggggcauaacaugcccaaugauccuaaccgcaacgucgacgaaaaugccaacgcgaauagcgcuguuaaaaacaauaacaaugaggaacccucugauaagcacaucaaagaguaccugaacaagauccagaauagccuuagcaccgagugguccccguguucugugacgugcggaaacggcauucaagugagaaucaaaccugggagcgccaauaagcccaaggacgaacuggauuaugccaacgacauugagaaaaagaucuguaaaauggaaaagugcuccagcgucuucaaugugguuaacucuuccauuggccucaucauggugcugagcuuucuuuuccugaauugaggacuaguuauaagacugacuagcccgaugggccucccaacgggcccuccuccccuccuugcaccgagauuaaucaaaggcucuuuucagagccaccaaaaaaaaaaaaaaaaaaaaaaaaaaaaaaaaaaaaaaaaaaaaaaaaaaaaaaaaaaaaaaaaagaauu

SEQ ID NO: 9433 - RNA, 1691 nt, Artificial Sequence
  mRNA Design i-3 (hSL-A64-N5) comprising derived and/or modified sequence from Pf(3D7)__XP_001351122.1__HsALB_Pf-CSP(19-272)_L(PVTN)_HBsAg (opt5)
aggagaaagcuuaccaugaagugggugaccuucaucagccugcucuuucuguucuccucugccuacagccuuuuucaggaguaucaaugcuacggcuccucuagcaacacaagaguccugaaugaacucaacuaugacaaugcugggacgaaccuguacaaugagcuugaaaugaacuauuacggaaaacaggagaauugguauucccugaagaaaaacucucggagccucggcgaaaaugaugacgggaacaaugaggauaacgagaagcugcgcaaacccaagcacaagaaacugaagcagccugccgacggaaauccggaucccaacgcgaauccuaacguugaccccaacgcuaauccuaacguggaucccaaugccaacccuaauguggacccgaacgccaaucccaacgcuaauccuaacgccaaucccaacgcuaauccuaacgccaaucccaacgcgaacccgaaugccaacccuaaugcuaaccccaaugccaacccuaaugcuaaccccaaugccaaccccaaugcgaacccuaaugccaacccgaaugcuaaccccaacgccaauccuaacgcuaaucccaacgccaauccuaacgucgaucccaaugccaacccgaaugcuaacccuaaugcgaaccccaaugccaacccuaaugcuaaccccaacgccaauccuaacgccaaucccaacgcuaauccgaacgccaauccuaacgcgaaucccaacgcuaaucccaacgccaauccuaacgccaauccgaacgcuaaucccaacgccaacccuaaugcuaaccccaaugccaacccuaaugcgaaucccccugugaccaacauggaaaacauuacauccggcuuccucgggccccugcuuguucugcaggccggauuuuuccuccugaccagaauccuuacaauuccgcaaagccuggacucuugguggaccucccucaauuuucugggcggcagcccugugugucuggggcagaacucucagucccccacaagcaaucauucuccuaccuccugucccccgaucugcccuggauaccgguggaugugccuccgcagauucauuaucuuucuguucauccuucugcucugucugauuuuucuucugguccuccuggauuaccagggcaugcugcccgugugcccucucauccccgggagcacgaccacaaacaccggacccuguaaaacaugcaccacgccugcucaaggcaauuccauguucccgucuuguugcuguacaaagcccaccgacgggaacugcacaugcauuccuauccccagcuccugggccuuugcuaaauaucugugggagugggccagcguucgguucucuuggcuuucccugcucgugccuuucguccagugguuugugggacugagccccaccguguggcuuucugcgauuuggaugaugugguacuggggcccuagccuguauuccaucgucucuccguucauuccccuccugccuaucuuuuucugucuguggguuuacaucugaggacuaguuauaagacugacuagcccgaugggccucccaacgggcccuccuccccuccuugcaccgagauuaaucaaaggcucuuuucagagccaccaaaaaaaaaaaaaaaaaaaaaaaaaaaaaaaaaaaaaaaaaaaaaaaaaaaaaaaaaaaaaaaaagaauu

SEQ ID NO: 9434 - RNA, 1808 nt, Artificial Sequence
  mRNA Design i-3 (hSL-A64-N5) comprising derived and/or modified sequence from Pf(3D7)__XP_001351122.1__HsALB_Pf-CSP(19-272)_L(AAY)_Pf-CSP(346-3 65)_L(AAY)_PADRE_L(PVTN)_HBsAg (opt5)
aggagaaagcuuaccaugaagugggugaccuucaucagccugcucuuucuguucuccucugccuacagccuuuuucaggaguaucaaugcuacggcuccucuagcaacacaagaguccugaaugaacucaacuaugacaaugcugggacgaaccuguacaaugagcuugaaaugaacuauuacggaaaacaggagaauugguauucccugaagaaaaacucucggagccucggcgaaaaugaugacgggaacaaugaggauaacgagaagcugcgcaaacccaagcacaagaaacugaagcagccugccgacggaaauccggaucccaacgcgaauccuaacguugaccccaacgcuaauccuaacguggaucccaaugccaacccuaauguggacccgaacgccaaucccaacgcuaauccuaacgccaaucccaacgcuaauccuaacgccaaucccaacgcgaacccgaaugccaacccuaaugcuaaccccaaugccaacccuaaugcuaaccccaaugccaaccccaaugcgaacccuaaugccaacccgaaugcuaaccccaacgccaauccuaacgcuaaucccaacgccaauccuaacgucgaucccaaugccaacccgaaugcuaacccuaaugcgaaccccaaugccaacccuaaugcuaaccccaacgccaauccuaacgccaaucccaacgcuaauccgaacgccaauccuaacgcgaaucccaacgcuaaucccaacgccaauccuaacgccaauccgaacgcuaaucccaacgccaacccuaaugcuaaccccaaugccaacccuaaugcgaaccccgccgcuuacauuaaaccuggcuccgccaauaagcccaaagacgaacucgauuacgcuaacgacaucgaggccgcguaugccaaguucguggcugccuggacccugaaggcugccgccccgguuacaaauauggaaaacauuaccagcggguuucuuggaccucugcucgugcugcaggcuggcuucuuucuucugacaagaauccucaccauuccccaaucucuggauuccugguggacaagccugaauuuccucggcgggucuccugucugucugggacagaacucccagagccccaccucuaaucauuccccgacgagcugcccucccaucuguccuggcuaccgguggaugugccuucgcagauuuaucauuuuccuguuuauccuccugcuuugucugauuuuccuccuggugcugcucgacuaucaggggaugcugcccguuugcccccuuaucccuggauccaccacaaccaacacaggcccguguaaaaccugcacgacacccgcgcaaggaaauucuauguuuccuagcuguugcuguaccaagcccacagacgggaacuguaccugcauuccuauccccuccagcugggccuucgcuaaauaccugugggagugggccucugugcgguucuccuggcucagccugcuugucccuuuugugcagugguucgugggccugucuccgaccgucuggcucagcgccauuuggaugaugugguauuggggccccucccuguacucuaucguuagcccuuuuaucccccugcucccuauuuucuuuugccuguggguguauaucugaggacuaguuauaagacugacuagcccgaugggccucccaacgggcccuccuccccuccuugcaccgagauuaaucaaaggcucuuuucagagccaccaaaaaaaaaaaaaaaaaaaaaaaaaaaaaaaaaaaaaaaaaaaaaaaaaaaaaaaaaaaaaaaaagaauu

SEQ ID NO: 9435 - RNA, 2027 nt, Artificial Sequence
  mRNA Design i-3 (hSL-A64-N5) comprising derived and/or modified sequence from Pf(3D7)__XP_001351122.1__HsALB_Pf-CSP(19-384)_L(PVTN)_HBsAg (opt5)
aggagaaagcuuaccaugaagugggugaccuucaucagccugcucuuucuguucuccucugccuacagccuuuuucaggaguaucaaugcuacggcuccucuagcaacacaagaguccugaaugaacucaacuaugacaaugcugggacgaaccuguacaaugagcuugaaaugaacuauuacggaaaacaggagaauugguauucccugaagaaaaacucucggagccucggcgaaaaugaugacgggaacaaugaggauaacgagaagcugcgcaaacccaagcacaagaaacugaagcagccugccgacggaaauccggaucccaacgcgaauccuaacguugaccccaacgcuaauccuaacguggaucccaaugccaacccuaauguggacccgaacgccaaucccaacgcuaauccuaacgccaaucccaacgcuaauccuaacgccaaucccaacgcgaacccgaaugccaacccuaaugcuaaccccaaugccaacccuaaugcuaaccccaaugccaaccccaaugcgaacccuaaugccaacccgaaugcuaaccccaacgccaauccuaacgcuaaucccaacgccaauccuaacgucgaucccaaugccaacccgaaugcuaacccuaaugcgaaccccaaugccaacccuaaugcuaaccccaacgccaauccuaacgccaaucccaacgcuaauccgaacgccaauccuaacgcgaaucccaacgcuaaucccaacgccaauccuaacgccaauccgaacgcuaaucccaacgccaacccuaaugcuaaccccaaugccaacccuaaugcgaaccccaauaaaaacaaucagggcaacgggcaaggacauaauaugccuaacgaccccaauagaaacguggaugaaaaugccaacgcuaacuccgccguuaagaauaacaauaacgaggaaccgagcgacaaacacauuaaggaguaccucaauaagauccagaacucucuguccaccgaguggagcccuuguucugugacaugcggcaauggcauucagguccggaucaaacccggguccgcuaacaagccuaaagaugaacuugacuacgccaaugacauugagaagaaaaucuguaagauggaaaaaugcagcucuguguucaacguugucaauuccagccccgugaccaacauggagaauaucacauccggauuucugggcccgcuccuggugcuucaggcgggguucuuucugcucacccgcauucugacaaucccucaaucucuggauagcugguggaccucccucaacuuccugggaggcagccccgugugucuugggcaaaauucucaguccccuacgagcaaccauucucccaccagcugucccccuauuugcccgggauauagauggaugugccugcggcgcuuuaucauuuuccucuuuauccugcuucugugucucauuuuccugcugguccuccuggacuaccagggcaugcuucccguuugcccucugauccccggcuccacaaccacaaacaccgggccuuguaagacgugcacaacccccgcccagggaaauucuauguuuccuagcugcuguugcacaaagccgaccgauggcaacuguaccugcauccccauuccuuccagcugggcuuucgccaaauaucucugggaaugggcuucugugagauucuccuggcugagccuucuggugcccuuuguccagugguucguggggcucucuccuacaguuuggcuguccgccaucuggaugaugugguacuggggacccagccuguauuccauugugucuccguuuaucccucuccugcccauuuucuuuugucuuugggucuacaucugaggacuaguuauaagacugacuagcccgaugggccucccaacgggcccuccuccccuccuugcaccgagauuaaucaaaggcucuuuucagagccaccaaaaaaaaaaaaaaaaaaaaaaaaaaaaaaaaaaaaaaaaaaaaaaaaaaaaaaaaaaaaaaaaagaauu

SEQ ID NO: 9436 - RNA, 1844 nt, Artificial Sequence
  mRNA Design i-3 (hSL-A64-N5) comprising derived and/or modified sequence from Pf(3D7)__XP_001351122.1__HsALB_Pf-CSP(19-384)_L(SGG)_Ferritin (opt5)
aggagaaagcuuaccaugaagugggugaccuucaucagccugcucuuucuguucuccucugccuacagccuuuuucaggaguaucaaugcuacggcuccucuagcaacacaagagugcugaaugaacucaacuaugacaaugcugggacgaaccuguacaaugagcuugaaaugaacuauuacggaaaacaggagaauugguauucccugaagaaaaacucucggagccucggcgaaaaugaugacgggaacaaugaggauaacgagaagcugcgcaaacccaagcacaagaaacugaagcagccugccgacggaaauccggaucccaacgcgaauccuaacguugaccccaacgcuaauccuaacguggaucccaaugccaacccuaauguggacccgaacgccaaucccaacgcuaauccuaacgccaaucccaacgcuaauccuaacgccaaucccaacgcgaacccgaaugccaacccuaaugcuaaccccaaugccaacccuaaugcuaaccccaaugccaaccccaaugcgaacccuaaugccaacccgaaugcuaaccccaacgccaauccuaacgcuaaucccaacgccaauccuaacgucgaucccaaugccaacccgaaugcuaacccuaaugcgaaccccaaugccaacccuaaugcuaaccccaacgccaauccuaacgccaaucccaacgcuaauccgaacgccaauccuaacgcgaaucccaacgcuaaucccaacgccaauccuaacgccaauccgaacgcuaaucccaacgccaacccuaaugcuaaccccaaugccaacccuaaugcgaaccccaauaaaaacaaucagggcaacgggcaaggacauaauaugccuaacgaccccaauagaaacguggaugaaaaugccaacgcuaacuccgccguuaagaauaacaauaacgaggaaccgagcgacaaacacauuaaggaguaccucaauaagauccagaacucucuguccaccgaguggagcccuuguucugugacaugcggcaauggcauucagguccggaucaaacccggguccgcuaacaagccuaaagaugaacuugacuacgccaaugacauugagaagaaaaucuguaagauggaaaaaugcagcucuguguucaacguugugaacuccagcuccggaggccugucuaaggauaucauuaagcuccugaaugagcaggucaauaaagaaaugaacagcuccaaucuuuauaugagcaugucuuccugguguuacacccauagccuggacggggcgggacucuuucuguucgaucacgccgcugaggaguaugaacaugccaagaaacugaucauuuuucucaacgagaacaaugugcccgugcaacugacaucuaucagcgcuccggaacacaaguucgagggccuuacccagauuuuucagaaagccuacgaacacgagcagcauaucuccgagucuauuaacaauaucgucgaccacgccaucaagagcaaggaucaugcuacauucaacuuucugcaaugguauguugcggaacagcacgaggaagagguccucuucaaagacauucuggauaagaucgaacuuauugggaaugagaaccacggacuguaccucgccgaccaguaugugaaaggcaucgcuaagucccgcaaaagcugaggacuaguuauaagacugacuagcccgaugggccucccaacgggcccuccuccccuccuugcaccgagauuaaucaaaggcucuuuucagagccaccaaaaaaaaaaaaaaaaaaaaaaaaaaaaaaaaaaaaaaaaaaaaaaaaaaaaaaaaaaaaaaaaagaauu

SEQ ID NO: 9437 - RNA, 1805 nt, Artificial Sequence
  mRNA Design i-3 (hSL-A64-N5) comprising derived and/or modified sequence from Pf(3D7)__XP_001351122.1__HsALB_Pf-CSP(93-384)_L(PVTN)_HBsAg (opt5)
aggagaaagcuuaccaugaagugggugaccuucaucagccugcucuuucuguucuccucugccuacagcaaacuuaagcagcccgcugacggcaacccugauccgaaugccaaccccaaugucgacccuaacgcgaaucccaacguugauccuaaugcuaaccccaauguggacccuaacgccaauccgaacgccaaucccaacgcuaauccuaacgccaaccccaaugcuaacccuaaugccaaccccaaugcgaacccgaaugccaacccuaaugcuaaccccaaugccaacccuaaugcuaaccccaaugccaaccccaacgcgaauccuaacgccaauccgaacgcuaaucccaacgccaauccuaacgcuaaucccaacguggauccuaaugccaaccccaaugccaacccgaaugcuaacccuaacgcgaaucccaacgccaauccuaacgcuaaucccaacgccaauccuaacgccaaucccaacgcuaauccgaacgccaauccuaacgcgaaucccaacgcuaaccccaaugccaacccuaaugccaacccgaaugcuaaccccaaugccaacccuaaugcuaaccccaaugccaacccuaauaaaaacaaucaagggaacggacagggccacaauaugcccaacgacccuaacagaaaugucgaugagaacgcgaaugccaacuccgcugugaagaauaacaauaacgaggaacccucugacaaacauauuaaggaauaucugaauaagauccagaacagccucuccacagaguggucuccgugcagcguuacgugugggaaugggauucaggugcggaucaaaccuggcuccgccaacaagcccaaagaugaacuggacuacgcuaaugauauugagaagaaaaucugcaagauggagaaguguagcucugucuuuaacgugguuaauuccagcccugugaccaacauggaaaacaucacaucuggguuccuuggaccccugcucguccugcaagccggcuuuuuccugcucacccgcauucugacaaucccgcagucccuugacagcugguggaccucucugaauuuucucggcggguccccugugugccugggacagaacagccagucccccacaucuaaucacagcccuaccuccuguccucccauuugccccggcuauagauggaugugucuucggcgcuucaucauuuuucuguucauccuccugcugugccucauuuuucugcuugugcugcucgauuaccaagggaugcugccggucuguccccuuaucccuggaagcacgaccacaaacaccggccccugcaaaacauguaccacgccugcgcagggaaauucuauguuccccuccugcugcuguacaaagccuaccgacggaaacugcacauguaucccgauucccagcucuugggccuuugcuaaauaucugugggagugggccagcguuagauucuccuggcucucucugcuggugccuuucgugcagugguuugucggccucagccccaccguguggcuguccgcuaucuggaugaugugguacuggggcccuagccuuuauucuauuguuucccccuucaucccgcugcucccuaucuuuuucugccuguggguguacauuugaggacuaguuauaagacugacuagcccgaugggccucccaacgggcccuccuccccuccuugcaccgagauuaaucaaaggcucuuuucagagccaccaaaaaaaaaaaaaaaaaaaaaaaaaaaaaaaaaaaaaaaaaaaaaaaaaaaaaaaaaaaaaaaaagaauu

SEQ ID NO: 9438 - RNA, 1466 nt, Artificial Sequence; identical to SEQ ID NO: 7223
  mRNA Design i-3 (hSL-A64-N5) comprising derived and/or modified sequence from Pf(3D7)__XP_001351122.1__HsALB_Pf-CSP(199-377)_L(PVTN)_HBsAg (opt5)

SEQ ID NO: 9439 - RNA, 1163 nt, Artificial Sequence
  mRNA Design i-3 (hSL-A64-N5) comprising derived and/or modified sequence from Pf(3D7)__XP_001351122.1__HsALB_Pf-CSP(19-272)_L(AAY)_Pf-CSP(346-3 75)_L(AAY)_Pf-CSP(310-327) (opt5)
aggagaaagcuuaccaugaagugggugaccuucaucagccugcucuuucuguucuccucugccuacagccuuuuucaggaguaucaaugcuacggcuccucuagcaacacaagaguccugaaugaacucaacuaugacaaugcugggacgaaccuguacaaugagcuugaaaugaacuauuacggaaaacaggagaauugguauucccugaagaaaaacucucggagccucggcgaaaaugaugacgggaacaaugaggauaacgagaagcugcgcaaacccaagcacaagaaacugaagcagccugccgacggaaauccggaucccaacgcgaauccuaacguugaccccaacgcuaauccuaacguggaucccaaugccaacccuaauguggacccgaacgccaaucccaacgcuaauccuaacgccaaucccaacgcuaauccuaacgccaaucccaacgcgaacccgaaugccaacccuaaugcuaaccccaaugccaacccuaaugcuaaccccaaugccaaccccaaugcgaacccuaaugccaacccgaaugcuaaccccaacgccaauccuaacgcuaaucccaacgccaauccuaacgucgaucccaaugccaacccgaaugcuaacccuaaugcgaaccccaaugccaacccuaaugcuaaccccaacgccaauccuaacgccaaucccaacgcuaauccgaacgccaauccuaacgcgaaucccaacgcuaaucccaacgccaauccuaacgccaauccgaacgcuaaucccaacgccaacccuaaugcuaaccccaaugccaacccuaaugcgaaccccgccgcuuacauuaaaccuggcuccgccaauaagcccaaagacgaacucgauuacgcuaacgacaucgagaagaagauuuguaaaauggaaaagugcagcgccgcguaugagccgucugauaaacauaucaaggaguaccugaauaaaauucagaacucccuuugaggacuaguuauaagacugacuagcccgaugggccucccaacgggcccuccuccccuccuugcaccgagauuaaucaaaggcucuuuucagagccaccaaaaaaaaaaaaaaaaaaaaaaaaaaaaaaaaaaaaaaaaaaaaaaaaaaaaaaaaaaaaaaaaagaauu

SEQ ID NO: 9440 - RNA, 1211 nt, Artificial Sequence
  mRNA Design i-3 (hSL-A64-N5) comprising derived and/or modified sequence from Pf(3D7)__XP_001351122.1__HsALB_Pf-CSP(19-272)_L(AAY)_Pf-CSP(346-3 75)_L(AAY)_Pf-CSP(310-327)_L(AAY)_PADRE (opt5)
aggagaaagcuuaccaugaagugggugaccuucaucagccugcucuuucuguucuccucugccuacagccuuuuucaggaguaucaaugcuacggcuccucuagcaacacaagaguccugaaugaacucaacuaugacaaugcugggacgaaccuguacaaugagcuugaaaugaacuauuacggaaaacaggagaauugguauucccugaagaaaaacucucggagccucggcgaaaaugaugacgggaacaaugaggauaacgagaagcugcgcaaacccaagcacaagaaacugaagcagccugccgacggaaauccggaucccaacgcgaauccuaacguugaccccaacgcuaauccuaacguggaucccaaugccaacccuaauguggacccgaacgccaaucccaacgcuaauccuaacgccaaucccaacgcuaauccuaacgccaaucccaacgcgaacccgaaugccaacccuaaugcuaaccccaaugccaacccuaaugcuaaccccaaugccaaccccaaugcgaacccuaaugccaacccgaaugcuaaccccaacgccaauccuaacgcuaaucccaacgccaauccuaacgucgaucccaaugccaacccgaaugcuaacccuaaugcgaaccccaaugccaacccuaaugcuaaccccaacgccaauccuaacgccaaucccaacgcuaauccgaacgccaauccuaacgcgaaucccaacgcuaaucccaacgccaauccuaacgccaauccgaacgcuaaucccaacgccaacccuaaugcuaaccccaaugccaacccuaaugcgaaccccgccgcuuacauuaaaccuggcuccgccaauaagcccaaagacgaacucgauuacgcuaacgacaucgagaagaagauuuguaaaauggaaaagugcagcgccgcguaugagccgucugauaaacauaucaaggaguaccugaauaaaauucagaacucccuugccgcuuaugccaaguucguggcugccuggacccugaaagccgcugcgugaggacuaguuauaagacugacuagcccgaugggccucccaacgggcccuccuccccuccuugcaccgagauuaaucaaaggcucuuuucagagccaccaaaaaaaaaaaaaaaaaaaaaaaaaaaaaaaaaaaaaaaaaaaaaaaaaaaaaaaaaaaaaaaaagaauu

SEQ ID NO: 9441 - RNA, 1211 nt, Artificial Sequence
  mRNA Design i-3 (hSL-A64-N5) comprising derived and/or modified sequence from Pf(3D7)__XP_001351122.1__HsALB_Pf-CSP(19-272)_L(AAY)_Pf-CSP(310-3 27)_L(AAY)_Pf-CSP(346-375)_L(AAY)_PADRE (opt5)
aggagaaagcuuaccaugaagugggugaccuucaucagccugcucuuucuguucuccucugccuacagccuuuuucaggaguaucaaugcuacggcuccucuagcaacacaagaguccugaaugaacucaacuaugacaaugcugggacgaaccuguacaaugagcuugaaaugaacuauuacggaaaacaggagaauugguauucccugaagaaaaacucucggagccucggcgaaaaugaugacgggaacaaugaggauaacgagaagcugcgcaaacccaagcacaagaaacugaagcagccugccgacggaaauccggaucccaacgcgaauccuaacguugaccccaacgcuaauccuaacguggaucccaaugccaacccuaauguggacccgaacgccaaucccaacgcuaauccuaacgccaaucccaacgcuaauccuaacgccaaucccaacgcgaacccgaaugccaacccuaaugcuaaccccaaugccaacccuaaugcuaaccccaaugccaaccccaaugcgaacccuaaugccaacccgaaugcuaaccccaacgccaauccuaacgcuaaucccaacgccaauccuaacgucgaucccaaugccaacccgaaugcuaacccuaaugcgaaccccaaugccaacccuaaugcuaaccccaacgccaauccuaacgccaaucccaacgcuaauccgaacgccaauccuaacgcgaaucccaacgcuaaucccaacgccaauccuaacgccaauccgaacgcuaaucccaacgccaacccuaaugcuaaccccaaugccaacccuaaugcgaaccccgccgcuuacgaaccuuccgacaaacauauuaaggaguaccucaauaaaauccagaacagccuggccgcuuauauuaagcccggcucugccaauaagccgaaagaugaacuugacuacgcgaacgauaucgagaagaaaauuuguaagauggagaaaugcuccgccgcuuaugccaaguucguggcugccuggacccugaaagccgcugcgugaggacuaguuauaagacugacuagcccgaugggccucccaacgggcccuccuccccuccuugcaccgagauuaaucaaaggcucuuuucagagccaccaaaaaaaaaaaaaaaaaaaaaaaaaaaaaaaaaaaaaaaaaaaaaaaaaaaaaaaaaaaaaaaaagaauu

SEQ ID NO: 9442 - RNA, 1265 nt, Artificial Sequence
  mRNA Design i-3 (hSL-A64-N5) comprising derived and/or modified sequence from Pf(3D7)__XP_001351122.1__HsALB_Pf-CSP(19-272)_L(AAY)_Pf-CSP(310-3 27)_L(AAY)_Pf-CSP(346-375)_L(AAY)_PADRE_L(AAY)_P2 (opt5)
aggagaaagcuuaccaugaagugggugaccuucaucagccugcucuuucuguucuccucugccuacagccuuuuucaggaguaucaaugcuacggcuccucuagcaacacaagaguccugaaugaacucaacuaugacaaugcugggacgaaccuguacaaugagcuugaaaugaacuauuacggaaaacaggagaauugguauucccugaagaaaaacucucggagccucggcgaaaaugaugacgggaacaaugaggauaacgagaagcugcgcaaacccaagcacaagaaacugaagcagccugccgacggaaauccggaucccaacgcgaauccuaacguugaccccaacgcuaauccuaacguggaucccaaugccaacccuaauguggacccgaacgccaaucccaacgcuaauccuaacgccaaucccaacgcuaauccuaacgccaaucccaacgcgaacccgaaugccaacccuaaugcuaaccccaaugccaacccuaaugcuaaccccaaugccaaccccaaugcgaacccuaaugccaacccgaaugcuaaccccaacgccaauccuaacgcuaaucccaacgccaauccuaacgucgaucccaaugccaacccgaaugcuaacccuaaugcgaaccccaaugccaacccuaaugcuaaccccaacgccaauccuaacgccaaucccaacgcuaauccgaacgccaauccuaacgcgaaucccaacgcuaaucccaacgccaauccuaacgccaauccgaacgcuaaucccaacgccaacccuaaugcuaaccccaaugccaacccuaaugcgaaccccgccgcuuacgaaccuuccgacaaacauauuaaggaguaccucaauaaaauccagaacagccuggccgcuuauauuaagcccggcucugccaauaagccgaaagaugaacuugacuacgcgaacgauaucgagaagaaaauuuguaagauggagaaaugcuccgccgcuuaugccaaguucguggcugccuggacccugaaagccgcugcggccgcuuaccaauauaucaaggccaauagcaaguuuaucgggauuacagaacucugaggacuaguuauaagacugacuagcccgaugggccucccaacgggcccuccuccccuccuugcaccgagauuaaucaaaggcucuuuucagagccaccaaaaaaaaaaaaaaaaaaaaaaaaaaaaaaaaaaaaaaaaaaaaaaaaaaaaaaaaaaaaaaaaagaauu

SEQ ID NO: 9443 - RNA, 1229 nt, Artificial Sequence
  mRNA Design i-3 (hSL-A64-N5) comprising derived and/or modified sequence from Pf(3D7)__XP_001351122.1__HsALB_Pf-CSP(19-272)_L(AAY)_Pf-CSP(310-3 27)_Linker (AAY)_Pf-CSP(346-397) (opt5)
aggagaaagcuuaccaugaagugggugaccuucaucagccugcucuuucuguucuccucugccuacagccuuuuucaggaguaucaaugcuacggcuccucuagcaacacaagaguccugaaugaacucaacuaugacaaugcugggacgaaccuguacaaugagcuugaaaugaacuauuacggaaaacaggagaauugguauucccugaagaaaaacucucggagccucggcgaaaaugaugacgggaacaaugaggauaacgagaagcugcgcaaacccaagcacaagaaacugaagcagccugccgacggaaauccggaucccaacgcgaauccuaacguugaccccaacgcuaauccuaacguggaucccaaugccaacccuaauguggacccgaacgccaaucccaacgcuaauccuaacgccaaucccaacgcuaauccuaacgccaaucccaacgcgaacccgaaugccaacccuaaugcuaaccccaaugccaacccuaaugcuaaccccaaugccaaccccaaugcgaacccuaaugccaacccgaaugcuaaccccaacgccaauccuaacgcuaaucccaacgccaauccuaacgucgaucccaaugccaacccgaaugcuaacccuaaugcgaaccccaaugccaacccuaaugcuaaccccaacgccaauccuaacgccaaucccaacgcuaauccgaacgccaauccuaacgcgaaucccaacgcuaaucccaacgccaauccuaacgccaauccgaacgcuaaucccaacgccaacccuaaugcuaaccccaaugccaacccuaaugcgaaccccgccgcuuacgaaccuuccgacaaacauauuaaggaguaccucaauaaaauccagaacagccuggccgcuuauauuaagcccggcucugccaauaagccgaaagaugaacuugacuacgcgaacgauaucgagaagaaaauuuguaagauggagaaaugcuccagcguguucaauguugugaacucuuccaucgggcugaucaugguccucagcuuucuguuccuuaauugaggacuaguuauaagacugacuagcccgaugggccucccaacgggcccuccuccccuccuugcaccgagauuaaucaaaggcucuuuucagagccaccaaaaaaaaaaaaaaaaaaaaaaaaaaaaaaaaaaaaaaaaaaaaaaaaaaaaaaaaaaaaaaaaagaauu

SEQ ID NO: 9444 - RNA, 1829 nt, Artificial Sequence
  mRNA Design i-3 (hSL-A64-N5) comprising derived and/or modified sequence from Pf(3D7)__XP_001351122.1__LumSynt_L(GGS4-GGG)_Pf-CSP(19-397) (opt6)
aggagaaagcuuaccaugcaaauauacgaaggaaaacuaacagcagaaggauuacgauucggcauaguagcaucaagguucaaccacgcauuaguagauagacuaguagaaggagcaauagacgcaauaguccgacauggaggacgagaagaagauauaacacuagucagaguaccagggagcugggaaaucccaguagcagcaggagaacucgcaagaaaagaagauaucgacgccguaaucgcaaucgggguacuaauaagaggcgcaacaccccauuucgacuacauagcaagcgaaguaucaaaaggauuagcagaccuaaguuuagaacuaagaaaaccuauuacauucggcgucauaacggcagacacauuagaacaagccaucgaaagagcaggaacaaaacacggaaacaaaggcugggaagcagcacuaagcgcaauugaaauggcaaauuuauucaaaucccuaagaggcggcucagguggcaguggaggaucaggaggaucaggaggaggccuauuccaagaauaucaaugcuacggaucgagcucgaauacacgcguauuaaacgaauuaaacuacgacaacgcaggaacaaaccuauacaacgaacuagaaaugaacuauuauggaaaacaagagaacugguacucccuaaaaaaaaacagucgaagcuuaggagaaaaugacgacggaaauaacgaagacaacgaaaaacuaagaaaacccaaacauaaaaaauuaaaacaacccgcugacggaaacccagacccaaacgcuaacccgaacguugauccaaaugcaaacccaaauguggauccaaaugcaaaccccaacguagauccaaaugcaaacccaaacgcaaaccccaaugccaacccaaacgccaacccuaaugcuaauccaaacgcaaacccaaacgcaaacccgaacgcaaauccaaacgcaaacccuaaugcuaacccaaaugcaaauccaaacgcaaacccaaacgcuaacccaaacgcaaacccaaaugcaaacccaaaugcaaacccaaacgcaaauccaaacguagacccaaacgcaaauccaaacgcaaauccaaacgcaaacccaaacgccaaccccaaugcaaauccgaacgcaaacccaaacgcaaacccaaacgcaaacccaaacgcaaacccaaaugccaacccaaacgcaaacccgaacgcaaacccaaacgcaaacccaaacgcaaacccuaaugcgaacccaaaugccaacccaaacgcaaaccccaacgcuaacccaaacaaaaacaaucaaggaaacggacaagggcacaacaugccaaacgauccaaacagaaaugucgacgaaaacgccaaugcaaacagugccguaaaaaauaauaacaacgaagaaccuucagacaaacacauaaaagaauacuuaaacaaaauacaaaacucauuaucaaccgaauggagcccauguucuguuacaugcggaaauggaauacaaguaagaauaaaaccaggaucagcaaacaaaccaaaagacgaauuagacuacgcaaaugauauagaaaaaaaaauaugcaagauggaaaaaugcaguucuguauuuaacguaguaaacagcucaauaggucuaauaaugguacuauccuuucuuuuccugaacuaaggacuaguuauaagacugacuagcccgaugggccucccaacgggcccuccuccccuccuugcaccgagauuaaucaaaggcucuuuucagagccaccaaaaaaaaaaaaaaaaaaaaaaaaaaaaaaaaaaaaaaaaaaaaaaaaaaaaaaaaaaaaaaaaagaauu

SEQ ID NO: 9445 - RNA, 1691 nt, Artificial Sequence
  mRNA Design i-3 (hSL-A64-N5) comprising derived and/or modified sequence from Pf(3D7)__XP_001351122.1__HsALB_Pf-CSP(19-272)_L(PVTN)_HBsAg (opt6)
aggagaaagcuuaccaugaaauggguaaccuucaucucacuauuauucuuauuuucaucugcauacucacucuuccaagaauaccaaugcuacgguucaucuucuaacacaagaguacuaaacgaacuaaacuacgacaacgcaggaacaaaccucuauaacgaacuugaaaugaacuacuauggaaaacaagaaaacugguauucccuaaaaaaaaacucaagauccuuaggagaaaacgacgacggaaauaacgaagacaacgaaaaacuaagaaaaccaaaacacaaaaaacuaaaacaacccgcagacggaaacccagacccaaacgcaaacccaaacguagacccaaacgcaaacccaaacgucgacccaaacgccaauccaaacguagacccaaacgcuaacccaaacgccaauccaaacgcaaauccaaaugccaacccaaacgcaaacccaaaugcgaauccaaaugcaaaccccaaugcaaacccaaacgcaaauccaaacgcaaacccaaacgcaaacccuaacgcaaauccaaaugcaaacccuaacgcaaacccaaacgcaaauccaaacgcaaacccaaaugcaaauccaaacgucgacccaaacgcaaacccgaacgcaaacccaaacgcaaacccaaaugcaaauccaaaugcaaaccccaaugcaaacccaaacgcaaacccaaacgcuaacccaaaugcaaacccaaacgcaaacccaaacgcaaauccaaacgcaaacccaaacgcaaacccaaaugcaaacccaaacgcaaaccccaaugcaaauccaaacgcaaacccaaacgcaaacccacccguaaccaacauggaaaacaucacaucaggauuccuuggaccccucuuaguacuucaagcaggauucuuccuauuaacaagaauacuaacaauaccucaaucuuuagauucaugguggacuucauuaaauuuccuaggaggaagcccaguaugcuuaggacaaaacagccaaucaccaaccucaaaccacucaccaaccucaugcccaccaauaugcccaggauaccgauggaugugccuaagaagauucauaauauucuuauucauacuacuacuaugccucauauucuuacuaguacuauuagacuaccaaggaaugcugccagucugcccacuuauaccagguagcaccaccacuaacacaggaccuugcaaaacaugcacaacacccgcucaaggaaauucuauguuuccaucaugcugcugcacuaaacccacagauggcaauuguacaugcauaccaauccccucaucaugggcauuugccaaauacuuaugggaaugggcaucuguaagauucucuuggcuaucacucuuaguaccauucguacaaugguucguaggccuauccccuacaguauggcuauccgcaauauggaugaugugguacuggggaccaucacuauacucaauagucucacccuucauaccacuauuaccaauauucuucugccuauggguauauauauaaggacuaguuauaagacugacuagcccgaugggccucccaacgggcccuccuccccuccuugcaccgagauuaaucaaaggcucuuuucagagccaccaaaaaaaaaaaaaaaaaaaaaaaaaaaaaaaaaaaaaaaaaaaaaaaaaaaaaaaaaaaaaaaaagaauu

SEQ ID NO: 9446 - RNA, 1808 nt, Artificial Sequence
  mRNA Design i-3 (hSL-A64-N5) comprising derived and/or modified sequence from Pf(3D7)__XP_001351122.1__HsALB_Pf-CSP(19-272)_L(AAY)_Pf-CSP(346-3 65)_L(AAY)_PADRE_L(PVTN)_HBsAg (opt6)
aggagaaagcuuaccaugaaaugggucaccuucauuuccuuauuauucuuauuuucguccgcauacucacuauuucaagaauaucaauguuacggaucaagcucaaacacccgcguacucaacgaacuaaacuacgacaacgcaggaacaaaccuauauaacgaacuagaaaugaauuauuacggaaaacaagaaaacugguauucacuuaaaaaaaacuccagaucccuuggcgaaaacgacgacggaaauaaugaagacaacgaaaaacuuagaaaaccaaaacauaaaaaacuaaaacaaccugcagacgguaacccagauccaaaugcuaacccaaauguagacccuaacgcuaacccaaacguagauccaaacgccaacccaaacguagauccaaacgcaaacccaaacgcaaauccaaaugcaaacccaaacgccaaccccaacgcaaacccaaaugcaaauccuaaugcaaaucccaacgcaaauccaaacgcaaauccaaaugcaaaccccaacgcaaacccaaaugcaaauccaaaugcaaauccaaaugcaaacccaaacgcaaacccaaaugcaaauccuaacgcaaacccaaacgucgaccccaacgcaaauccaaacgcaaacccaaacgcaaaccccaaugcaaacccaaaugcaaacccaaacgcaaacccaaacgcaaaccccaacgcaaauccaaacgcaaauccaaaugcaaauccaaacgcaaaccccaaugcaaaccccaaugcuaacccaaacgccaaucccaacgcaaacccaaacgcaaaucccaacgcaaauccaaacgcaaacccugcagcauacauaaaacccggcucugcuaauaaacccaaagaugaacucgacuaugccaacgacauagaagcagccuacgcaaaauucguagcugcauggacauuaaaagcagcagcaccagugacaaacauggaaaacauuacaucaggauucuuagguccauuauuaguccuccaagcaggauucuucuuacuaacuagaauauuaacaauaccacaaucccuagacucuugguggacuucacuaaauuuccuaggaggauccccaguaugucucggucaaaauucucaaucaccuacaucaaaccauucaccaacaagcugccccccaaucugucccggauacagauggaugugccuacgcagauucauuauauuucuauucauacuacuucuaugccuaauauuccuacuaguccuucuagacuaccaaggaaugcuacccguaugcccacuuauaccaggauccacaacaacaaacacagguccaugcaaaacaugcacaacaccagcccaagguaauucuauguucccaucaugcuguugcacaaaaccaacagacgguaacugcacaugcaucccaauacccucaucaugggcauucgcaaaauaccuaugggaaugggcuucaguaagauucuccugguuaucccuuuuagucccauucguacaaugguucguaggauuaucacccacuguauggcuaucagcaauauggaugaugugguauuggggcccaucucuuuacucaaucgucuccccuuuuauuccacuacuacccauauuuuucugccuauggguauacauuuaaggacuaguuauaagacugacuagcccgaugggccucccaacgggcccuccuccccuccuugcaccgagauuaaucaaaggcucuuuucagagccaccaaaaaaaaaaaaaaaaaaaaaaaaaaaaaaaaaaaaaaaaaaaaaaaaaaaaaaaaaaaaaaaaagaauu

SEQ ID NO: 9447 - RNA, 2027 nt, Artificial Sequence
  mRNA Design i-3 (hSL-A64-N5) comprising derived and/or modified sequence from Pf(3D7)__XP_001351122.1__HsALB_Pf-CSP(19-384)_L(PVTN)_HBsAg (opt6)
aggagaaagcuuaccaugaaauggguaaccuucauaucucucuuauuccuuuuuucaucugcauauucacuauuucaagaauaucaauguuauggaucaucaucaaacacccgaguacucaacgaauuaaauuacgacaacgcagguacuaacuuauacaacgaauuagaaaugaauuacuauggaaaacaagaaaacugguauucccucaaaaaaaacucucgaucucuaggcgaaaacgacgacggcaacaacgaagacaacgaaaaacuacguaaacccaaacacaaaaaacuaaaacaaccagcagauggaaacccagacccaaacgcaaacccaaacguagacccaaacgcaaauccaaacguagacccgaacgcaaauccaaauguagaucccaaugcuaauccaaaugccaacccaaacgcaaacccuaacgcuaaucccaacgcaaacccaaacgcaaacccaaaugcaaacccaaacgcaaaccccaacgcaaacccaaaugcaaauccaaaugcaaauccaaacgccaacccaaaugccaacccaaacgcaaauccaaacgcuaaccccaacgcaaaccccaacgccaaucccaacguagaccccaacgcaaacccaaaugcaaauccaaacgcaaaccccaaugcaaacccaaacgcuaacccuaaugcaaacccaaacgccaacccaaaugcaaaccccaacgccaacccaaacgcaaauccaaacgcaaacccaaacgcuaacccaaacgccaacccaaacgcaaacccaaacgcuaacccaaacgcaaacccaaaugcaaacccaaaugcuaauccaaauaaaaacaaccaaggaaacggccaaggacauaauaugccuaacgacccaaacagaaacguagacgaaaaugcaaacgcaaacuccgcaguaaaaaauaacaauaacgaagaacccuccgacaaacauauaaaagaauaucuaaacaaaauacaaaauucacucucuacugaaugguccccaugcucaguaacauguggaaacggaauccaaguacgcauaaaaccaggaucagcaaacaaaccaaaagacgaacuagacuacgcaaacgauauagaaaaaaaaauaugcaaaauggaaaaaugcuccuccguauucaacguagucaauucaucuccaguaaccaauauggaaaauauaaccuccggauuccuaggaccacuacucguuuuacaagcaggauucuucuuacuaacaagaauacucacuauaccacaaucccuggauucuugguggacaucccuaaauuucuuaggcggaucacccguaugccuaggccaaaauagccaaaguccaacuucaaaccacuccccaacuucuugcccaccaauaugccccggcuacagauggaugugccuucgacgauucauaauauuucuauucauacuauuacuaugucuaauauuccuacucguucuauuagacuaccaaggaauguuaccaguuugcccacuaauaccugguucaacaaccacuaacacuggucccugcaaaacauguaccaccccagcccaaggaaacucaauguuccccucaugcuguugcacaaaaccaaccgacggaaauugcacaugcauacccauaccaucuucuugggcauuugcuaaauaucuaugggaaugggcaucaguacgcuucucauggcuaucucuacuaguaccauucguccaaugguucguaggccuaucaccaacaguauggcuaucugcaauauggaugaugugguacuggggucccuccuuauauucaauuguaucaccuuuuaucccacuccuacccauauucuucuguuuauggguauacauauaaggacuaguuauaagacugacuagcccgaugggccucccaacgggcccuccuccccuccuugcaccgagauuaaucaaaggcucuuuucagagccaccaaaaaaaaaaaaaaaaaaaaaaaaaaaaaaaaaaaaaaaaaaaaaaaaaaaaaaaaaaaaaaaaagaauu

SEQ ID NO: 9448 - RNA, 1844 nt, Artificial Sequence
  mRNA Design i-3 (hSL-A64-N5) comprising derived and/or modified sequence from Pf(3D7)__XP_001351122.1__HsALB_Pf-CSP(19-384)_L(SGG)_Ferritin (opt6)
aggagaaagcuuaccaugaaauggguaacauuuauaucucuauuauucuuauucuccucagcauacucacucuuucaagaauaccaaugcuacgguucuucauccaacacacgaguccuaaacgaauuaaacuacgacaaugcaggaaccaaucuauacaaugaacuugaaaugaacuacuacggaaaacaagaaaacugguacucccuaaaaaaaaacucacgaagccuaggagaaaaugacgacggaaacaacgaagacaacgaaaaacuacgaaaacccaaacacaaaaaacuaaaacaacccgccgacggcaauccagauccaaacgcaaacccaaacguagaccccaacgccaacccaaacguagauccaaacgcaaauccaaauguugauccaaaugcaaaccccaacgcaaacccaaacgcaaacccaaacgcaaacccaaacgcaaacccaaacgcaaauccaaaugcaaaucccaacgcaaauccaaacgcaaauccaaaugcaaacccaaacgcuaaucccaacgcuaacccaaacgcaaacccaaacgcaaacccgaacgcuaacccaaacgcaaacccaaacgcaaaccccaacguagacccaaacgcaaacccaaacgcaaaccccaacgcaaacccaaacgcaaacccaaacgcaaaccccaacgcaaaccccaacgcaaacccaaacgccaaccccaaugcaaacccaaacgccaacccaaacgcaaacccaaacgcaaacccaaacgcaaacccaaacgcaaauccaaacgcaaacccaaacgcaaacccaaacgcaaacccaaaugcaaacccaaacaaaaacaaccaaggaaauggacaaggacacaacaugccaaacgacccaaaccguaacguagaugaaaaugccaacgcaaacucagccguaaaaaacaacaacaacgaagaaccuucagacaaacacauaaaagaauacuuaaacaaaauacaaaacucauuaucaacugaauggucccccuguucagucacaugcggaaauggaauacaaguaagaauuaaaccagguucagccaacaaaccaaaagacgaacuagacuacgcaaacgacauugaaaaaaaaauauguaaaauggaaaaauguaguucagucuucaacguaguaaacucaucauccggaggauuauccaaagacauaauaaaacucuuaaaugaacaaguaaacaaagaaaugaacucgagcaaccucuauaugucaaugucauccuggugcuacacccauucccuagacggcgccggacuauuccuguucgaccaugcagcagaagaauaugaacacgcaaaaaagcuaaucaucuucuuaaacgaaaacaaugucccaguacaacuaaccuccauaucagcaccugaacauaaauucgaaggacuaacacaaauauuucaaaaagcauacgaacacgaacaacacauaucagaaucaauuaauaacauaguagaccacgcaaucaaaagcaaggaccacgcaacauucaacuuucuacaaugguacguagcagaacaacaugaagaagaaguacucuucaaagacaucuuagacaaaauugaacucauaggaaacgaaaaucacggacucuaccucgcagaccaguacguaaaaggaaucgcaaaaucacguaaaagcuaaggacuaguuauaagacugacuagcccgaugggccucccaacgggcccuccuccccuccuugcaccgagauuaaucaaaggcucuuuucagagccaccaaaaaaaaaaaaaaaaaaaaaaaaaaaaaaaaaaaaaaaaaaaaaaaaaaaaaaaaaaaaaaaaagaauu

SEQ ID NO: 9449 - RNA, 1805 nt, Artificial Sequence
  mRNA Design i-3 (hSL-A64-N5) comprising derived and/or modified sequence from Pf(3D7)__XP_001351122.1__HsALB_Pf-CSP(93-384)_L(PVTN)_HBsAg (opt6)
aggagaaagcuuaccaugaaauggguaacuuuuauaucccuccuauuucuauuuucaucagccuauucaaaacuaaaacaacccgcagauggaaaucccgacccaaaugcaaauccaaauguagauccaaacgccaacccaaaugucgacccaaaugcaaacccaaacguagauccuaacgcaaacccaaaugcuaauccaaacgcuaacccaaacgcaaauccaaaugcuaacccaaacgcaaacccuaacgcaaacccaaacgcuaacccaaacgcaaacccaaacgccaacccaaacgcaaaccccaacgcaaacccuaacgcaaacccaaacgcaaacccaaaugccaacccaaacgcaaacccaaacgcaaacccaaacguagaccccaacgcuaauccaaaugcaaauccaaacgcaaacccaaaugccaacccaaacgccaacccuaaugcaaacccaaacgcaaacccaaaugcaaaccccaacgcaaauccaaacgcaaauccaaaugcaaacccaaacgcuaacccaaacgcaaaccccaaugcaaacccaaacgcaaauccaaaugcaaacccaaaugcaaauccaaaugcaaacccaaauaaaaacaaccaaggaaacggacaaggccauaacaugccaaacgacccaaaccgcaacgucgaugaaaacgccaacgcaaauucagcgguuaaaaacaacaacaaugaagaacccucagacaaacacauaaaagaauacuuaaacaaaauacaaaacucacuaucgacagaaugguccccaugcuccguaaccugcgguaauggaauacaagucagaauaaaaccaggaucagcuaauaaaccaaaagacgaauuagacuacgcaaacgacauagaaaagaaaauaugcaaaauggaaaaauguucuucaguauuuaacguagucaacucaucacccguaacuaacauggaaaacauaaccucaggauuucuagguccuuuacucguacuacaagcaggauuuuuccuacuuacccgaauccuaacaauaccucaaucucuagacucaugguggacaucccuaaauuucuuaggcggaucaccaguuugccucggacaaaacucucaaucaccaacuucaaaucacuccccaacaucuugcccaccaauaugcccaggauaucgauggaugugucuacgacguuuuauaauauuucuauuuauacuacuacucugucuaauauuccuauuaguacuacucgacuaucaaggaaugcuccccgucuguccccucauacccggaucaacaacuacaaacaccggaccgugcaaaaccugcacaaccccagcucaaggaaauucaauguucccaucaugcugcuguacaaaaccaacagauggaaacugcacaugcauaccaaucccaucaagcugggccuuugccaaauauuuaugggaaugggccuccgucagauucucauggcucucccuucuaguuccauucguacaaugguuuguaggccuauccccaaccguauggcuauccgccauauggaugaugugguauuggggaccaucacuauacucaauaguauccccauucauaccacuccuacccauauucuuuugccuauggguauacauuuaaggacuaguuauaagacugacuagcccgaugggccucccaacgggcccuccuccccuccuugcaccgagauuaaucaaaggcucuuuucagagccaccaaaaaaaaaaaaaaaaaaaaaaaaaaaaaaaaaaaaaaaaaaaaaaaaaaaaaaaaaaaaaaaaagaauu

SEQ ID NO: 9450 - RNA, 1466 nt, Artificial Sequence
  mRNA Design i-3 (hSL-A64-N5) comprising derived and/or modified sequence from Pf(3D7)__XP_001351122.1__HsALB_Pf-CSP(199-377)_L(PVTN)_HBsAg (opt6)
aggagaaagcuuaccaugaaauggguaacauucauaucauuacucuucuuauuuuccucugcauacucagauccaaaugcaaacccaaaugcaaacccaaacgcaaacccaaaugccaauccaaaugcaaacccaaaugcaaacccaaacgcaaacccaaacgcaaacccaaacgcaaacccuaaugcaaacccaaaugcaaauccaaacgcuaacccaaacgcaaacccaaaugccaacccaaacgccaauccaaacgcaaacccaaacgcaaaucccaaugcaaacccuaacaaaaacaaucaaggaaacggacaaggccacaacaugccaaaugacccaaaccgcaauguagacgaaaaugccaacgcaaacuccgcuguaaaaaacaauaacaacgaagaaccuuccgauaaacauauaaaagaauacuuaaauaaaauacaaaauucauuaucaacagaauggucaccaugcucagucacaugcggaaauggaauacaaguaagaauaaaacccgguuccgcaaacaaaccaaaagacgaacuagacuacgcaaaugacaucgaaaaaaaaauaugcaaaauggaaaaauguucuucaguaccaguaacaaacauggaaaacaucaccucuggauuccuaggaccacuauuaguacuacaagcaggauucuuccuccuaacaagaauauuaacaauaccacaaucacuugacucaugguggacaucccucaauuuccuaggaggauccccaguaugucuaggucaaaacucucaaucuccaacauccaaccauucacccacaucaugcccucccauaugcccaggauaccgauggaugugccucagaagauucauaauauuccuauucauauuacuccuauguuuaaucuuucuacuagucuuauuagacuaccaaggaaugcuaccaguaugcccacuaaucccaggauccacaacaacaaacacaggccccugcaaaacauguacaacaccagcacaaggaaacucaauguucccaucaugcuguugcacaaaaccaacagacggaaacugcacaugcaucccaauaccaucaucuugggcauuugcaaaauacuuaugggaaugggcaucaguacgcuuuucauggcucucccuccucguaccauucguccaaugguucguaggucuaucaccaacaguuuggcuauccgcuauauggaugaugugguauuggggcccuucccuauacucaauaguuucaccauuuauaccacuccuaccaauauuuuucugccuuuggguauacauauaaggacuaguuauaagacugacuagcccgaugggccucccaacgggcccuccuccccuccuugcaccgagauuaaucaaaggcucuuuucagagccaccaaaaaaaaaaaaaaaaaaaaaaaaaaaaaaaaaaaaaaaaaaaaaaaaaaaaaaaaaaaaaaaaagaauu

SEQ ID NO: 9451 - RNA, 1163 nt, Artificial Sequence
  mRNA Design i-3 (hSL-A64-N5) comprising derived and/or modified sequence from Pf(3D7)__XP_001351122.1__HsALB_Pf-CSP(19-272)_L(AAY)_Pf-CSP(346-3 75)_L(AAY)_Pf-CSP(310-327) (opt6)
aggagaaagcuuaccaugaaauggguaaccuucauuucacuucucuuccuauucuccagcgcauacucacucuuccaagaauaccaaugcuacggcucaaguuccaacacacgaguacuaaacgaauuaaacuacgacaaugcuggaaccaaccuauacaacgaacucgaaaugaacuacuacgguaaacaagaaaacugguauucacuaaaaaaaaacucaaggucccuaggagaaaacgacgacggaaacaacgaagacaacgaaaaauuaagaaaaccaaaacacaaaaaacuaaaacaacccgcagacggaaaccccgacccaaacgcaaacccaaacguagauccaaacgcaaacccaaacguagacccaaacgcaaacccaaacguagacccaaacgcaaacccuaaugcaaacccaaacgcaaacccaaacgcaaacccaaacgcaaacccaaacgcaaacccaaacgcaaaccccaacgccaacccaaacgcaaacccaaacgcaaacccaaacgcaaacccaaacgcaaacccaaacgcaaacccaaacgcaaacccaaacgcaaacccaaaugcaaacccaaacgcaaacccaaacguagacccaaacgcaaacccaaacgcaaacccaaaugcaaacccaaacgcaaacccaaacgcaaacccaaacgcuaacccaaacgcaaacccaaacgcuaauccaaaugcuaaccccaacgcaaacccaaaugcaaacccaaacgcuaauccaaaugcaaauccaaacgcaaacccaaacgcaaacccaaacgcaaacccaaacgcaaacccaaacgcaaauccagccgcauacauaaaacccggcucagcaaacaaaccaaaagacgaacuagacuacgccaacgacauagaaaaaaaaauaugcaaaauggaaaaaugcucagccgcauacgaaccaucagacaaacacaucaaagaauacuuaaacaaaauacaaaacagcuuauaaggacuaguuauaagacugacuagcccgaugggccucccaacgggcccuccuccccuccuugcaccgagauuaaucaaaggcucuuuucagagccaccaaaaaaaaaaaaaaaaaaaaaaaaaaaaaaaaaaaaaaaaaaaaaaaaaaaaaaaaaaaaaaaaagaauu

SEQ ID NO: 9452 - RNA, 1211 nt, Artificial Sequence
  mRNA Design i-3 (hSL-A64-N5) comprising derived and/or modified sequence from Pf(3D7)__XP_001351122.1__HsALB_Pf-CSP(19-272)_L(AAY)_Pf-CSP(346-3 75)_L(AAY)_Pf-CSP(310-327)_L(AAY)_PADRE (opt6)
aggagaaagcuuaccaugaaauggguaacauucauaucacuacuauuccuauucucauccgccuacucacucuuucaagaauaucaaugcuacggaucaagcucaaauacaagaguacuaaacgaacuaaacuacgacaacgcaggaaccaaccuauacaacgaacuagaaaugaacuacuacggaaaacaagaaaacugguacucacuuaaaaaaaacucaagaucacuaggagaaaacgacgacggaaacaacgaagacaacgaaaaacuacgaaaaccaaaacauaaaaaacuaaaacaaccagcagacggaaacccagacccaaacgcaaauccaaacguagacccaaaugcaaacccaaacguagacccaaacgcaaacccaaacguagacccaaaugcaaacccaaacgcaaauccaaacgcaaacccaaacgcaaacccaaacgcaaacccaaacgcaaacccaaacgcaaacccaaaugcaaauccaaacgcaaacccaaaugcaaacccaaacgcaaacccaaacgcgaacccaaacgccaaccccaacgcaaacccaaacgcaaauccaaaugcaaacccaaacgccaauccaaacguagacccaaacgcaaauccaaacgcaaacccaaacgcaaacccaaacgcaaacccuaacgcaaacccaaacgcaaacccaaacgcaaacccaaacgccaacccaaacgcaaaccccaacgcaaacccaaacgcaaacccaaacgcaaaccccaacgcaaauccaaacgcuaacccaaacgcuaaccccaacgcaaacccaaaugcaaacccaaacgccaacccagccgcauacauaaaaccaggaucagcaaauaaaccaaaagacgaacuagacuacgcaaacgacauagaaaaaaaaauaugcaaaauggaaaaaugcuccgcagcauacgaaccaucagacaaacacaucaaagaauaccuaaacaaaauccaaaacucacuagccgccuacgcaaaauuugucgcagcauggacacucaaagcagcagcauaaggacuaguuauaagacugacuagcccgaugggccucccaacgggcccuccuccccuccuugcaccgagauuaaucaaaggcucuuuucagagccaccaaaaaaaaaaaaaaaaaaaaaaaaaaaaaaaaaaaaaaaaaaaaaaaaaaaaaaaaaaaaaaaaagaauu

SEQ ID NO: 9453 - RNA, 1211 nt, Artificial Sequence
  mRNA Design i-3 (hSL-A64-N5) comprising derived and/or modified sequence from Pf(3D7)__XP_001351122.1__HsALB_Pf-CSP(19-272)_L(AAY)_Pf-CSP(310-3 27)_L(AAY)_Pf-CSP(346-375)_L(AAY)_PADRE (opt6)
aggagaaagcuuaccaugaaauggguaaccuucauaucccuacuauuucuauucuccucagcauacucacuauuccaagaauaccaaugcuacggcucaucaucaaacacaagaguacuaaaugaacuaaacuacgacaacgccggaaccaaccuauacaaugaacucgaaaugaauuacuacggaaaacaagaaaacugguacucacuaaaaaaaaacucaagaagccuaggagaaaacgacgacggaaacaacgaagacaacgaaaaauuacgaaaaccaaaacauaaaaaacuaaaacaacccgccgacggaaacccagacccaaacgcaaacccaaacguagacccaaacgcaaauccaaacguagacccaaacgcaaauccaaauguagacccaaacgcaaacccaaacgcaaacccaaacgcaaacccaaacgcaaacccgaacgcaaauccaaacgcaaacccaaacgcaaacccaaacgcaaacccaaacgcaaacccaaacgcaaaccccaacgcaaacccaaaugcaaacccaaacgcaaacccaaaugcaaauccaaacgcaaacccaaacgcaaacccaaacgcaaacccaaacguagacccaaaugcaaaccccaacgcaaacccaaacgcaaacccaaacgcaaacccaaacgcaaacccaaacgcaaacccaaacgcaaacccaaacgcaaacccaaacgccaauccaaacgcaaauccaaacgcaaacccaaacgcaaacccaaacgcaaacccaaacgcaaacccaaacgcaaacccaaacgcaaacccaaaugcaaacccaaacgcaaacccagcagcauacgaaccuucagacaaacacauaaaagaauacuuaaacaaaauacaaaacucacuagcagccuacaucaaaccaggauccgcaaacaaaccaaaagacgaacuagacuacgcaaacgacauagaaaaaaaaauauguaaaauggaaaaaugcucagccgcauaugcuaaauucgucgcagcauggaccuuaaaagcagcagcauaaggacuaguuauaagacugacuagcccgaugggccucccaacgggcccuccuccccuccuugcaccgagauuaaucaaaggcucuuuucagagccaccaaaaaaaaaaaaaaaaaaaaaaaaaaaaaaaaaaaaaaaaaaaaaaaaaaaaaaaaaaaaaaaaagaauu

SEQ ID NO: 9454 - RNA, 1265 nt, Artificial Sequence
  mRNA Design i-3 (hSL-A64-N5) comprising derived and/or modified sequence from Pf(3D7)__XP_001351122.1__HsALB_Pf-CSP(19-272)_L(AAY)_Pf-CSP(310-3 27)_L(AAY)_Pf-CSP(346-375)_L(AAY)_PADRE_L(AAY)_P2 (opt6)
aggagaaagcuuaccaugaaaugggucaccuucaucucacuacuauuuuuauucuccagcgcauacucauuauuccaagaauaccaaugcuauggcucaagcucaaacacaagaguauuaaacgaacuaaacuacgauaacgccggaacaaaccuauacaacgaacucgaaaugaacuacuauggaaaacaagaaaacugguacucacuuaaaaaaaauucaagaucucuaggagaaaacgacgacggaaacaaugaagacaacgagaaauuaagaaaaccaaaacacaaaaaacuaaaacaaccagcagacggaaacccagacccaaacgcaaacccaaacguagacccaaacgcaaacccaaacguagacccaaacgcaaacccaaacguagauccgaacgcaaauccaaacgcaaauccaaacgcaaacccaaaugcaaacccaaaugcaaacccaaaugcaaacccaaacgcaaacccaaacgcaaacccaaacgcaaaccccaacgcaaacccaaacgcaaauccaaacgcaaacccaaacgcaaacccaaacgcaaaccccaacgcaaacccaaacgcaaacccgaacgcgaacccaaacguggauccaaacgcaaacccaaaugcaaaucccaacgcaaacccaaaugcaaacccaaacgcaaacccaaacgcaaacccaaacgcaaacccaaaugcaaacccaaacgcaaacccaaacgcaaacccaaacgcaaacccaaacgcaaauccaaacgcaaauccaaaugcaaacccaaacgcaaacccaaacgcaaaccccaacgcaaauccaaacgcaaacccagccgcauacgaaccaucagacaaacauauaaaagaauaucuaaacaaaauucaaaacucacucgcagcauacauaaaaccaggaagcgcaaacaaaccuaaagacgaacuagacuacgcaaacgacauagaaaaaaaaauaugcaaaauggaaaaaugcucagcagcguacgcaaaauucguagcagcauggacacuaaaagcagcagccgcagcauaccaauacauaaaagcaaauucaaaauucaucggaauuacagaacuauaaggacuaguuauaagacugacuagcccgaugggccucccaacgggcccuccuccccuccuugcaccgagauuaaucaaaggcucuuuucagagccaccaaaaaaaaaaaaaaaaaaaaaaaaaaaaaaaaaaaaaaaaaaaaaaaaaaaaaaaaaaaaaaaaagaauu

SEQ ID NO: 9455 - RNA, 1229 nt, Artificial Sequence
  mRNA Design i-3 (hSL-A64-N5) comprising derived and/or modified sequence from Pf(3D7)__XP_001351122.1__HsALB_Pf-CSP(19-272)_L(AAY)_Pf-CSP(310-3 27)_Linker (AAY)_Pf-CSP(346-397) (opt6)
aggagaaagcuuaccaugaaauggguuacauucauaucauuacuauuccucuuuuccucagcauacucacucuuucaagaauaccaaugcuacggcucauccucaaacacaagaguacucaacgaacucaacuaugacaacgcaggaacaaaccucuacaacgaacuugaaaugaauuacuauggaaaacaagaaaacugguacucauuaaaaaaaaacucaagauccuuaggcgaaaacgacgacggaaacaacgaagacaacgagaaacuccgaaaaccaaaacacaaaaaacuaaaacaaccagcagacggaaacccagacccaaacgcaaacccaaacguagacccaaacgcaaacccaaacguagacccaaacgcaaacccaaacguagacccaaacgcaaacccaaacgcaaacccaaacgcaaacccaaacgcaaacccaaacgcaaacccaaacgcaaacccaaacgcaaacccaaacgcaaacccaaacgcaaacccaaacgcaaacccaaacgccaacccaaacgcaaacccaaacgccaacccaaacgcaaacccaaacgcaaacccaaacgcaaauccaaacgccaacccaaacguagacccaaacgcaaacccaaacgcaaacccaaacgcaaacccaaacgcaaaccccaacgccaacccaaacgccaaccccaacgcaaauccaaacgcaaacccaaacgcaaaccccaacgcaaacccaaacgcaaacccaaacgcaaacccaaacgcuaacccaaacgcaaaccccaacgcaaauccaaacgcaaacccaaacgcaaacccaaaugcaaacccagcagcauaugaaccuucagauaaacacauaaaagaauaccuaaacaaaauccaaaacucucucgcagccuacaucaaaccaggaucagcaaacaaacccaaagacgaacuagacuacgcaaaugauaucgaaaaaaaaauaugcaaaauggaaaaaugcucgagcguauuuaacguaguaaacucaucaaucggacucauaaugguacuaucauuucuauuccucaacuaaggacuaguuauaagacugacuagcccgaugggccucccaacgggcccuccuccccuccuugcaccgagauuaaucaaaggcucuuuucagagccaccaaaaaaaaaaaaaaaaaaaaaaaaaaaaaaaaaaaaaaaaaaaaaaaaaaaaaaaaaaaaaaaaagaauu

SEQ ID NO: 9456 - RNA, 1829 nt, Artificial Sequence
  mRNA Design i-3 (hSL-A64-N5) comprising derived and/or modified sequence from Pf(3D7)__XP_001351122.1__LumSynt_L(GGS4-GGG)_Pf-CSP(19-397) (opt11)
aggagaaagcuuaccaugcaaauauacgagggcaaacucacggcugaaggccuacgcuuuggcaucgucgcaucacgguucaaucacgcacucguggacaggcucguagaaggugccaucgacgcaauaguacgccacggcgggcgcgaagaggacauaacgcuaguacgcguacccggaagcugggaaauccccguagccgcaggcgaacucgcacgcaaagaagacaucgacgccgugaucgcaauaggaguccugauccgaggcgcaacaccacacuucgacuacaucgccuccgaagucucaaaaggccuagcggaucugagccucgaacugcgcaaaccuauaacauucggcgucauaacagccgacacauuagaacaggccauagaaagagccggaaccaaacauggaaacaaaggcugggaagcggcccuaagcgccaucgaaauggcaaaccucuucaaaagccugcgcggaggaucaggcggcagcggcggcuccggaggaagcggcggcggucuuuuucaagaauaccaaugcuacggcuccucaucgaacacacgcguacucaaugaacugaacuacgacaaugcaggaaccaaccucuacaacgaacucgagaugaacuacuacggcaaacaagaaaacugguacucgcuaaagaaaaacuccagaucccugggcgaaaacgacgacggaaacaacgaagacaacgaaaaacuacgcaaaccaaaacacaagaaacuaaaacaaccagcagacggaaacccagacccaaacgcgaacccaaacgucgacccaaacgcaaacccaaacguagacccaaacgcaaacccaaacgucgaccccaacgcaaacccaaacgccaaccccaacgcaaaccccaacgcgaacccaaacgcgaaccccaacgcaaacccaaacgcaaaccccaacgcaaacccaaacgcaaacccaaacgccaacccgaaugccaacccgaacgcaaacccgaacgcaaaccccaacgcgaaccccaacgcaaacccaaaugccaaccccaacgcaaaccccaacguagacccgaacgcaaacccgaacgcaaacccgaacgcaaacccaaacgcaaacccaaacgccaaccccaacgccaacccaaacgcgaacccaaaugcaaaccccaacgccaacccgaacgccaacccaaacgcaaacccgaacgcaaaccccaacgcaaaccccaacgcaaaccccaacgcaaacccgaacgccaacccaaacgcaaacccaaacgcaaacccaaacaaaaacaaccaaggaaacgggcaaggccacaacaugcccaacgacccaaaccgaaauguagaugaaaacgcaaacgccaacagcgcggucaaaaacaacaacaacgaagaacccucggacaaacacauaaaagaauaccuaaacaaaauccagaacucccucucaacagaauggucccccugcucaguuaccugcgguaaugguauacaaguccgcauuaaaccgggaucugccaacaaaccaaaagaugagcuagacuacgccaacgacauagaaaagaaaaucugcaaaauggagaaaugcuccucagucuucaacguaguaaacagcucgauagggcucaucaugguacucuccuuuuuauuccucaacuaaggacuaguuauaagacugacuagcccgaugggccucccaacgggcccuccuccccuccuugcaccgagauuaaucaaaggcucuuuucagagccaccaaaaaaaaaaaaaaaaaaaaaaaaaaaaaaaaaaaaaaaaaaaaaaaaaaaaaaaaaaaaaaaaagaauu

SEQ ID NO: 9457 - RNA, 1691 nt, Artificial Sequence
  mRNA Design i-3 (hSL-A64-N5) comprising derived and/or modified sequence from Pf(3D7)__XP_001351122.1__HsALB_Pf-CSP(19-272)_L(PVTN)_HBsAg (opt11)
aggagaaagcuuaccaugaaaugggucaccuucaucucccuccucuuccucuucuccucugccuacucacucuuccaagaauaccaaugcuacggcuccucuuccaacacccgcguacucaacgaacucaacuaugacaaugcaggaaccaaccuauacaacgagcuagagaugaacuacuacggcaaacaagaaaacugguacucccucaagaaaaacucacgcucccuuggcgaaaaugacgacggcaacaacgaagacaacgaaaaacuucgcaaacccaaacacaagaaauuaaaacaaccagccgacggcaacccagaccccaacgccaaccccaacgucgaccccaacgccaacccuaacgucgaccccaacgcaaacccuaacgucgauccaaacgccaaccccaacgcuaaccccaacgcaaauccgaacgcaaaccccaacgccaacccuaacgccaaccccaacgccaacccaaacgccaaccccaacgcuaaccccaacgcaaacccgaacgccaaccccaacgccaaccccaacgcaaaccccaacgccaaccccaaugcaaaccccaacgccaacccaaaugccaaccccaacgucgaccccaacgcaaaccccaacgcuaacccuaacgcuaacccaaacgccaacccaaacgcuaaccccaacgccaaccccaacgccaaccccaacgcaaacccaaacgcaaacccuaacgccaacccuaacgcaaaccccaacgcgaaccccaacgcaaaccccaacgcaaaccccaacgccaaccccaacgccaacccaaacgccaauccaaacgcaaaucccccagucaccaacauggaaaacaucaccucaggcuuccucggcccccuucucguccuacaagcugguuucuuccuucuaacccgcauccucacgaucccccaaucccucgacucaugguggaccucacucaacuuucucggaggcucacccguaugccucggacaaaacucccaaucccccaccuccaaccauuccccaaccucaugcccaccaauaugccccggcuaccguuggaugugccuccgccguuucaucauauuccuuuucauacuccuccucugccucaucuuccugcucgugcuccuagacuaucaagguaugcuacccguaugcccacucauccccggcucaaccacgacaaacacuggccccugcaaaacaugcaccacacccgcacaaggaaacuccauguuccccucaugcugcugcaccaaaccaacagacggaaacuguaccugcaucccuauccccuccuccugggccuucgcaaaauaucuaugggagugggccagcguacgcuuuuccuggcuuucccuccugguccccuucguccaaugguucguaggccucuccccaaccguauggcuauccgcaaucuggaugaugugguacuggggcccaucucucuacucaauaguaucacccuucaucccacuccuccccaucuucuucugccucuggguauacaucuaaggacuaguuauaagacugacuagcccgaugggccucccaacgggcccuccuccccuccuugcaccgagauuaaucaaaggcucuuuucagagccaccaaaaaaaaaaaaaaaaaaaaaaaaaaaaaaaaaaaaaaaaaaaaaaaaaaaaaaaaaaaaaaaaagaauu

SEQ ID NO: 9458 - RNA, 1808 nt, Artificial Sequence
  mRNA Design i-3 (hSL-A64-N5) comprising derived and/or modified sequence from Pf(3D7)__XP_001351122.1__HsALB_Pf-CSP(19-272)_L(AAY)_Pf-CSP(346-3 65)_L(AAY)_PADRE_L(PVTN)_HBsAg (opt11)
aggagaaagcuuaccaugaaauggguaaccuucauaucccuucuauucuuauucucuuccgcauacucccucuuccaagaauaucagugcuacggcucauccucaaacacacgaguccucaacgaacucaacuacgacaacgccggcaccaaucucuacaacgaacucgaaaugaacuacuacggcaaacaagaaaacugguacucccuuaagaaaaacucacgcucucucggcgaaaacgacgacggcaacaacgaagacaacgaaaaauuacgcaaacccaaacacaagaaacucaaacaaccagccgacggcaacccagaccccaaugcaaacccuaacgucgaccccaacgccaacccuaacgucgacccaaacgccaacccgaacgucgaccccaacgcaaacccaaacgccaaccccaaugccaaucccaacgccaacccuaacgccaaccccaacgccaaccccaacgccaacccuaacgccaaccccaaugcaaacccaaacgccaacccaaacgcaaacccaaacgccaauccaaacgccaacccaaacgccaaccccaacgccaacccaaacgccaaucccaacgccaaccccaacguagaccccaaugcgaacccaaacgccaacccuaacgccaaccccaacgcaaacccaaacgcuaacccaaacgcaaaccccaacgcaaaccccaacgcaaacccgaacgcgaaccccaacgccaauccaaacgcaaacccuaacgcaaacccaaacgccaacccaaacgccaacccaaacgcaaacccaaacgccaauccaaacgcaaacccgaacgcaaaccccgccgcuuacaucaaacccggaucggccaacaaacccaaagacgaacuugauuacgccaacgacaucgaagcagccuacgcaaaauucguagcggccuggacccuaaaagcagcagcacccgucacaaacauggaaaacaucacaucuggcuucuuaggcccacuccuaguccuccaggccggcuucuuccuacuaacccguauacucaccauaccacaaucacucgacucaugguggaccucccuaaacuuccucggcggaucacccgucugccugggccaaaacucgcaaucccccaccucaaaucauucgcccacaucaugcccgcccaucugccccggcuaccgguggaugugccuccgcagauucauaaucuuccucuucauacuacuacuuugccuaaucuuccucuuaguccuacucgacuaccaaggcaugcuccccgucugcccccuuauacccggcuccaccaccaccaauaccggccccugcaaaaccugcacaacacccgcccaaggcaacucaauguucccguccugcuguugcaccaaaccaaccgacggaaauugcacaugcaucccaauccccucaucaugggcauucgccaaauaccucugggaaugggccuccguccguuucuccuggcucagccuacucguucccuucguccaaugguuugucggccuuucaccuacaguauggcuauccgccauauggaugaugugguacuggggacccucacucuacucaauugucucccccuucaucccauuacuccccaucuucuucugccucugggucuacauauaaggacuaguuauaagacugacuagcccgaugggccucccaacgggcccuccuccccuccuugcaccgagauuaaucaaaggcucuuuucagagccaccaaaaaaaaaaaaaaaaaaaaaaaaaaaaaaaaaaaaaaaaaaaaaaaaaaaaaaaaaaaaaaaaagaauu

SEQ ID NO: 9459 - RNA, 2027 nt, Artificial Sequence
  mRNA Design i-3 (hSL-A64-N5) comprising derived and/or modified sequence from Pf(3D7)__XP_001351122.1__HsALB_Pf-CSP(19-384)_L(PVTN)_HBsAg (opt11)
aggagaaagcuuaccaugaaaugggucaccuucauaucacuccuauuccuauuuucaagcgccuacucccucuuccaagaauaucaaugcuauggcucaagcucaaacacccgcguccucaacgagcuaaacuacgacaacgcaggaaccaaccucuacaacgaacuggaaaugaacuacuacggaaaacaagagaacugguacuccuuaaagaaaaacucccgcucccucggcgaaaacgaugacgguaacaacgaagacaaugaaaaacuccgaaaacccaaacacaagaaacuaaaacaaccagccgacggaaaccccgacccgaacgcaaaccccaacguagacccaaacgcaaacccuaauguagacccaaacgccaacccaaacgucgacccaaacgcaaacccaaacgcuaaccccaacgccaacccaaacgccaaccccaacgccaaccccaaugccaacccaaacgcgaaccccaacgcaaaccccaacgccaacccgaacgccaacccaaacgccaacccaaacgccaaccccaacgcgaacccaaacgccaacccaaacgcuaaccccaacgcaaaccccaacgccaacccuaacgucgacccaaacgccaaucccaacgccaaccccaacgcaaaccccaacgccaacccgaacgcgaaccccaacgcaaaccccaacgcaaacccaaacgccaaccccaacgccaacccaaacgccaacccgaacgccaacccaaacgcgaaucccaaugccaaccccaacgccaauccuaaugcaaacccaaacgcaaaccccaacgccaauccgaacgcaaacccgaacaaaaacaaccaagguaacggccaaggccacaacaugcccaacgaccccaaccgcaacgucgacgaaaacgcaaacgccaacuccgcaguuaaaaacaacaacaacgaagaaccaucagacaaacacauaaaagaauaccucaacaaaauccaaaacucgcucuccaccgaauggucccccuguagcguaaccugcgguaauggaauacaaguccgaaucaaaccaggcucugccaacaaacccaaagacgaacuagacuacgccaacgacauugaaaagaaaaucugcaaaauggaaaaauguagcuccgucuucaacguagucaacuccucccccguuaccaacauggagaacauaaccuccggcuuccucggcccccuucucgugcuacaggccggauucuuccuccuaaccaggauccuaaccaucccccagucacucgacuccugguggaccucacucaacuuccucggcggaucccccgucugccucggacaaaacucccaaucccccaccucaaaccacuccccaaccucuugcccgcccauaugccccgguuaccgcuggaugugccuucgccgcuucaucauauuucuauucauccuccuucucugccuaauauuccuacucguacuccucgacuaccaaggcaugcuacccgucugcccucuuauacccggauccacgacaaccaacaccggccccugcaaaaccugcaccacacccgcccaaggcaacucuauguuccccucaugcugcugcacaaaacccaccgacggcaacugcacaugcauaccaauccccucuuccugggccuuugccaaauaccuuugggaaugggcuuccguccguuuuuccugguuaucccuccuggucccauucguccaaugguucgucggccuuucaccaaccgucuggcuauccgccaucuggaugaugugguacuggggucccucccucuacagcaucgucucaccauuuaucccccuccugcccaucuucuucugcuuguggguauacauaugaggacuaguuauaagacugacuagcccgaugggccucccaacgggcccuccuccccuccuugcaccgagauuaaucaaaggcucuuuucagagccaccaaaaaaaaaaaaaaaaaaaaaaaaaaaaaaaaaaaaaaaaaaaaaaaaaaaaaaaaaaaaaaaaagaauu

SEQ ID NO: 9460 - RNA, 1844 nt, Artificial Sequence
  mRNA Design i-3 (hSL-A64-N5) comprising derived and/or modified sequence from Pf(3D7)__XP_001351122.1__HsALB_Pf-CSP(19-384)_L(SGG)_Ferritin (opt11)
aggagaaagcuuaccaugaaaugggucaccuucauaucacuacuuuuccuguucuccucagcauacucacucuuccaagaguaccaaugcuacggcucaucauccaauacccgcguacuuaacgaauuaaacuacgacaacgcaggcaccaaccucuacaacgaacucgaaaugaacuauuacggaaaacaagaaaacugguacucacuaaagaaaaacagcagaucccucggcgaaaacgacgacggcaauaacgaagacaacgaaaaacugagaaaaccuaaacacaagaaacucaaacaacccgcagacggcaaccccgaccccaacgccaacccaaacguagaccccaacgccaaccccaacgucgaccccaacgccaacccuaaugucgacccaaacgcaaacccuaacgcaaaccccaaugccaacccaaacgccaaccccaacgcaaaccccaacgcaaauccaaacgcaaaucccaacgcaaaccccaaugccaaccccaacgcaaacccaaacgccaaccccaacgcaaaccccaacgcuaacccaaacgccaacccaaacgcaaacccaaacgccaaccccaacgcuaaccccaacgucgaccccaacgccaaccccaacgcaaacccaaacgccaaccccaaugcaaacccaaacgccaaccccaacgcaaacccaaacgccaacccaaacgccaaccccaacgcaaaccccaacgcuaaccccaacgcaaaccccaaugcaaacccgaacgccaacccaaacgcaaacccaaacgccaacccaaacgccaaccccaacgccaacccaaacgccaacccaaacaaaaacaaccaagguaacggacaaggccacaacaugcccaacgauccuaaccgcaacguagacgaaaacgccaacgcaaacagcgcagucaaaaacaacaacaacgaggaaccaucagacaaacacaucaaagaauaccucaacaaaauccaaaacucccuauccacagaauggucacccugcuccguaaccugcggcaacggcauccaaguacgcaucaaacccggauccgcaaacaaaccaaaagaugaauuagauuaugcaaacgacauagaaaagaaaauaugcaaaauggaaaaaugcuccuccguauucaacguagucaacuccucuucagggggacucuccaaagacaucaucaaacuucucaacgaacaagucaacaaagagaugaacagcuccaaccucuacaugucaaugucaagcuggugcuacacacacucacuggacggcgccggccucuuccuauucgaccacgccgcagaagaauacgaacacgccaagaaacuuauaaucuuccuaaacgaaaauaacguaccuguccaacucacaucaaucucggccccagaacauaaauucgaagggcucacgcaaauauuucaaaaagcauacgaacacgaacagcacaucuccgaaucaaucaacaacauugucgaccacgcaaucaaauccaaagaccacgccacauucaacuuccuacaaugguacguggccgaacaacacgaagaagaaguccucuucaaagacauacuagacaaaaucgaacuaaucggcaacgaaaaccacggccucuaccuagccgaccaauacguaaaaggaaucgcgaaaucccgcaaauccuaaggacuaguuauaagacugacuagcccgaugggccucccaacgggcccuccuccccuccuugcaccgagauuaaucaaaggcucuuuucagagccaccaaaaaaaaaaaaaaaaaaaaaaaaaaaaaaaaaaaaaaaaaaaaaaaaaaaaaaaaaaaaaaaaagaauu

SEQ ID NO: 9461 - RNA, 1805 nt, Artificial Sequence
  mRNA Design i-3 (hSL-A64-N5) comprising derived and/or modified sequence from Pf(3D7)__XP_001351122.1__HsALB_Pf-CSP(93-384)_L(PVTN)_HBsAg (opt11)
aggagaaagcuuaccaugaaaugggucaccuuuaucucacuccuauuucucuucucuuccgcauacuccaaacucaaacaacccgcagacggaaaccccgacccaaacgcaaaccccaacguagaccccaacgccaaccccaacgucgaccccaacgccaaccccaacguagaccccaacgcaaaccccaacgccaacccaaacgccaaccccaacgccaaccccaacgccaaucccaacgccaacccaaacgcaaaucccaacgcaaaccccaacgccaaccccaacgccaacccaaacgccaauccaaacgcaaacccuaacgccaacccuaacgcgaaccccaacgccaaccccaacgcaaaccccaacgccaaccccaaugucgaccccaacgccaaccccaacgccaaccccaacgcaaaccccaacgcaaacccaaacgccaaucccaacgccaaccccaacgcaaacccuaacgccaaccccaaugccaauccuaacgccaaccccaacgccaacccuaacgccaacccaaacgccaaccccaacgccaaccccaacgccaacccuaacgccaacccuaacgccaacccaaacgccaauccaaacaagaacaaccaaggcaacggucaaggccacaauaugccaaacgacccaaaccgaaacguagacgaaaacgccaacgccaacuccgccgucaaaaacaacaacaacgaagaacccuccgacaaacacaucaaagaauaucugaacaaaauccaaaacucccucuccaccgaauggucccccugcuccgucacuuguggcaauggcauacaaguccgcaucaaacccggcucagccaacaaacccaaagacgaacucgacuacgcaaacgacaucgaaaagaaaauaugcaaaauggaaaaaugcuccucugucuucaacgucgucaacuccucgcccguaaccaacauggaaaacaucaccucaggauuccucggcccccuacucguccuccaagccggcuucuuccuccucacccgaauccuuacaaucccccaaucccuugacucaugguggaccucccuuaauuuccucggcgguucccccgucugccuuggccaaaacucacaaucccccaccucaaaccacucccccacuuccugcccgcccauaugccccggcuaccgcuggaugugccuccgccgguucaucauauuccucuucauccuacuccucugccuuauauuucuauuaguccuccuagacuaccaaggaaugcuccccguaugcccacuaauccccggauccaccaccaccaacaccggccccugcaaaaccugcaccaccccugcacaaggaaacuccauguucccaucuuguugcugcacaaaaccaaccgacggcaacuguaccugcauccccaucccuucaucaugggccuucgccaaauaccuaugggaaugggccucaguacguuucuccuggcuaucccuccucgucccauucguucaaugguucgucggccuaucccccacgguauggcucuccgcaauauggaugaugugguacuggggccccucacuauacaguauaguuucccccuucauaccccuccuccccauauucuucugccucuggguauacaucuagggacuaguuauaagacugacuagcccgaugggccucccaacgggcccuccuccccuccuugcaccgagauuaaucaaaggcucuuuucagagccaccaaaaaaaaaaaaaaaaaaaaaaaaaaaaaaaaaaaaaaaaaaaaaaaaaaaaaaaaaaaaaaaaagaauu

SEQ ID NO: 9462 - RNA, 1466 nt, Artificial Sequence
  mRNA Design i-3 (hSL-A64-N5) comprising derived and/or modified sequence from Pf(3D7)__XP_001351122.1__HsALB_Pf-CSP(199-377)_L(PVTN)_HBsAg (opt11)
aggagaaagcuuaccaugaaauggguaaccuucaucucccuccuauucuuauucucaucagccuacuccgacccaaacgcaaaccccaaugccaaccccaacgccaaccccaacgccaaucccaacgccaaccccaacgccaaucccaaugcuaaccccaacgccaacccaaacgccaacccaaacgcaaaccccaacgccaaccccaacgccaaccccaacgccaacccaaacgccaaccccaacgcaaaccccaacgccaacccaaacgccaaccccaacgccaacccaaacaaaaacaaucaaggcaacggccaaggacacaacaugcccaacgaccccaaccgcaacgucgacgaaaacgcaaacgccaacucugcagucaaaaacaacaacaacgaagaacccuccgacaaacacauaaaagaauaccucaacaaaauccaaaacucccucuccacagaaugguccccaugcuccgucacgugcggcaacggcauccaaguacgcaucaaacccggcucugccaacaaaccuaaagacgaacucgacuacgccaacgacaucgaaaagaaaaucugcaaaauggaaaaaugcuccucaguccccguaacuaacauggaaaacaucacguccggcuuccucggcccccuccuaguccuccaagccggcuucuuccuacucacacgcauucuuaccaucccgcaaucacucgacuccugguggaccucccucaacuucuuaggcggcuccccugucugccucggccaaaacucacaaucccccacuucaaaccacucacccaccagcugcccacccauaugcccaggauaccgcuggaugugccuccgccguuucauaaucuuccucuucauacuccuacucugccuaaucuuccuccucguacuccuagacuaccaaggcaugcuccccgucugcccacucauccccggaagcacuacaaccaacaccggccccugcaaaacaugcaccacccccgcacaaggcaacuccauguuccccuccugcugcugcacaaaacccacugauggcaacugcacuugcauccccauccccuccucaugggccuucgccaaauaucucugggaaugggccagcguccgguucucuuggcucucacuccuaguccccuucguucaaugguucguaggccuaucccccaccgucuggcucuccgcaauauggaugaugugguauuggggccccucccucuacuccauuguaucccccuucaucccacuacuccccaucuucuucugccuuugggucuacauauaaggacuaguuauaagacugacuagcccgaugggccucccaacgggcccuccuccccuccuugcaccgagauuaaucaaaggcucuuuucagagccaccaaaaaaaaaaaaaaaaaaaaaaaaaaaaaaaaaaaaaaaaaaaaaaaaaaaaaaaaaaaaaaaaagaauu

SEQ ID NO: 9463 - RNA, 1163 nt, Artificial Sequence
  mRNA Design i-3 (hSL-A64-N5) comprising derived and/or modified sequence from Pf(3D7)__XP_001351122.1__HsALB_Pf-CSP(19-272)_L(AAY)_Pf-CSP(346-3 75)_L(AAY)_Pf-CSP(310-327) (opt11)
aggagaaagcuuaccaugaaauggguaaccuucaucucacuccuauuccuguucuccagugcauacucacucuuccaagaauaccaaugcuacggcuccagcagcaacacgcgaguccucaacgaacuaaacuacgauaacgccggaaccaaccuuuacaacgaacucgaaaugaacuacuacggcaaacaagaaaacugguacucacuaaaaaaaaacagcagaucacuaggcgaaaacgacgacggaaacaacgaagacaacgaaaaacuacgcaagcccaaacacaagaaacucaaacaacccgcagacggaaacccagaccccaacgcaaaccccaacguagaccccaacgcaaaccccaacguagaccccaacgcaaaucccaacguagacccaaacgcaaaccccaacgcaaacccaaacgcaaacccaaacgcgaacccaaacgcaaacccaaacgcaaacccgaacgccaacccaaacgcaaacccaaacgcuaaccccaacgcaaacccaaacgcaaacccaaacgcaaacccaaacgcaaacccaaacgcaaacccaaacgcaaacccgaacgcaaacccaaacgcaaaccccaacguagacccaaacgccaacccaaacgcaaaccccaacgccaacccaaacgcaaacccaaacgcaaacccaaacgcaaacccaaacgcaaacccaaacgcaaacccaaacgcaaaccccaacgcgaacccaaacgccaacccaaacgcaaacccaaacgcgaacccaaacgccaaccccaacgcaaaccccaacgcaaaccccaacgcaaacccaaacgcaaaccccgccgcuuacauaaaacccggcucggccaauaaaccaaaagacgaacucgacuacgccaacgacauagaaaaaaaaauaugcaaaauggaaaaaugcagcgccgccuacgaaccaucagacaaacacaucaaagaauaccucaacaaaauacaaaacagccucuaaggacuaguuauaagacugacuagcccgaugggccucccaacgggcccuccuccccuccuugcaccgagauuaaucaaaggcucuuuucagagccaccaaaaaaaaaaaaaaaaaaaaaaaaaaaaaaaaaaaaaaaaaaaaaaaaaaaaaaaaaaaaaaaaagaauu

SEQ ID NO: 9464 - RNA, 1211 nt, Artificial Sequence
  mRNA Design i-3 (hSL-A64-N5) comprising derived and/or modified sequence from Pf(3D7)__XP_001351122.1__HsALB_Pf-CSP(19-272)_L(AAY)_Pf-CSP(346-3 75)_L(AAY)_Pf-CSP(310-327)_L(AAY)_PADRE (opt11)
aggagaaagcuuaccaugaaauggguaacauuuaucucccuccucuuccucuuuuccuccgcauacucacucuuccaagaauaccaaugcuacggaucaagcuccaacacccgcguccuuaacgaacuuaacuacgacaacgccggcaccaacuuauacaacgaacucgagaugaacuacuacggcaaacaagaaaacugguacucccucaaaaaaaacuccagaucccucggcgaaaacgacgacggaaacaacgaagacaacgaaaaacuccgcaaacccaaacacaaaaaacucaaacaacccgcugacggcaacccugaccccaacgccaaccccaacguagaccccaacgccaaucccaacguagacccaaacgccaaccccaacguagaccccaacgccaaccccaacgcaaacccaaacgccaaccccaacgccaaccccaacgcgaacccaaacgccaaccccaacgccaacccuaacgccaacccgaacgccaaccccaacgccaaccccaacgccaaccccaacgcgaaccccaacgcaaaccccaacgccaaccccaacgcaaaccccaacgccaaccccaacgccaaccccaacguagaccccaacgccaacccaaacgccaacccaaacgcaaaccccaacgccaauccaaacgcaaaccccaacgcaaaccccaaugccaacccaaacgccaaccccaacgccaacccaaacgccaacccaaacgccaaccccaacgcaaacccaaacgcaaaccccaacgcaaacccuaacgccaacccaaacgccaacccaaacgcaaaccccaacgcaaaccccgccgccuacaucaaaccaggcuccgccaauaaaccaaaagacgaacucgacuacgcaaaugacauagaaaaaaaaauaugcaaaauggaaaaaugcuccgcagccuacgaacccagcgacaaacauaucaaagaauacuuaaacaaaauccaaaacucccuagccgccuacgccaaauucgucgcagccuggacccucaaagccgccgccuaaggacuaguuauaagacugacuagcccgaugggccucccaacgggcccuccuccccuccuugcaccgagauuaaucaaaggcucuuuucagagccaccaaaaaaaaaaaaaaaaaaaaaaaaaaaaaaaaaaaaaaaaaaaaaaaaaaaaaaaaaaaaaaaaagaauu

SEQ ID NO: 9465 - RNA, 1211 nt, Artificial Sequence
  mRNA Design i-3 (hSL-A64-N5) comprising derived and/or modified sequence from Pf(3D7)__XP_001351122.1__HsALB_Pf-CSP(19-272)_L(AAY)_Pf-CSP(310-3 27)_L(AAY)_Pf-CSP(346-375)_L(AAY)_PADRE (opt11)
aggagaaagcuuaccaugaaaugggugaccuuuaucucacuccucuuccucuucucaagcgcauacucacucuuccaagaauaccaaugcuacgguucaagcucaaacacaagaguccucaacgaacucaacuacgacaacgccggaaccaaccucuacaacgaacucgaaaugaacuacuacggcaaacaagaaaacugguacucacucaaaaaaaacagcaggucccuaggcgaaaacgacgacggaaacaacgaagacaacgaaaaacuccgcaaaccaaaacacaaaaaacugaaacaacccgcagacggaaacccagaccccaacgcaaacccgaacgucgacccgaacgccaacccaaacguagacccaaacgcaaaccccaacgucgacccaaacgcaaacccaaacgcaaacccaaacgcaaacccgaacgcaaacccaaacgcgaacccaaacgcaaacccaaacgcaaacccaaacgccaacccaaacgcaaacccaaaugcaaaccccaacgcaaacccgaacgcaaacccaaacgcaaaccccaacgcaaacccaaacgcuaacccaaacgcgaaccccaacgcaaacccaaacguggacccaaacgcaaacccaaacgcaaacccaaacgcgaacccgaacgcaaacccaaacgcgaacccaaacgcaaaccccaacgcaaacccaaacgcaaacccaaacgccaacccaaacgcaaacccaaacgcgaaccccaacgccaacccaaacgcaaacccaaacgcaaacccaaacgcaaacccaaacgcaaacccaaacgccaacccaaacgcaaacccagcugccuacgaacccuccgacaaacacaucaaagaguaccugaacaaaauccaaaacucccucgcagccuacaucaagcccggauccgcaaacaaacccaaagacgaacucgacuacgccaacgacauagaaaaaaaaaucugcaaaauggaaaaaugcucagccgcauacgcaaaauucguagcagccuggacccuaaaagcggcagcauaaggacuaguuauaagacugacuagcccgaugggccucccaacgggcccuccuccccuccuugcaccgagauuaaucaaaggcucuuuucagagccaccaaaaaaaaaaaaaaaaaaaaaaaaaaaaaaaaaaaaaaaaaaaaaaaaaaaaaaaaaaaaaaaaagaauu

SEQ ID NO: 9466 - RNA, 1265 nt, Artificial Sequence
  mRNA Design i-3 (hSL-A64-N5) comprising derived and/or modified sequence from Pf(3D7)__XP_001351122.1__HsALB_Pf-CSP(19-272)_L(AAY)_Pf-CSP(310-3 27)_L(AAY)_Pf-CSP(346-375)_L(AAY)_PADRE_L(AAY)_P2 (opt11)
aggagaaagcuuaccaugaaaugggugaccuucauaucacuauuauuccucuucucaagcgcauacucacucuuccaagaauaccaaugcuacggcuccuccucaaacacgcgcguacucaacgaacuaaacuacgacaacgccggaacaaaccucuacaacgaacuagaaaugaacuacuacggcaaacaagaaaacugguacucccuaaaaaaaaacucaagaucccuaggcgagaaugacgacggcaacaacgaagacaacgaaaaacuccgcaaacccaaacacaaaaaacucaaacaacccgccgacggaaacccagacccaaacgccaacccaaacgucgacccaaacgcaaaccccaacguagaccccaacgcaaacccaaacguagacccaaacgcaaacccaaacgcaaacccaaacgcaaaccccaacgccaacccaaacgcaaacccaaacgccaauccaaacgcaaacccaaaugccaacccaaacgcaaacccaaacgcaaacccaaacgccaaccccaacgcaaacccaaacgcaaacccaaacgccaacccaaacgcaaacccaaacgcaaaccccaacgccaacccgaacguagaccccaacgcaaaccccaacgcaaacccaaacgccaauccaaacgcaaaccccaacgcaaaccccaacgcaaaccccaacgccaauccaaacgccaaccccaacgcgaacccgaacgcaaacccaaacgcaaacccaaacgcaaacccaaacgcaaacccaaacgcaaacccaaacgcaaacccgaacgcaaaccccaacgccaacccaaacgcaaacccagccgcauacgaacccucagacaaacacauaaaagaauaccuaaacaaaauccaaaacucacucgcugccuacaucaaaccaggaagcgcaaacaaacccaaagacgaacucgauuacgccaacgacaucgaaaaaaaaaucugcaaaauggaaaaaugcuccgccgccuacgcaaaauucgucgcagccuggacucuaaaagccgccgcagccgcauaccaauacauaaaagccaacucaaaauucaucggaaucaccgaacuguaaggacuaguuauaagacugacuagcccgaugggccucccaacgggcccuccuccccuccuugcaccgagauuaaucaaaggcucuuuucagagccaccaaaaaaaaaaaaaaaaaaaaaaaaaaaaaaaaaaaaaaaaaaaaaaaaaaaaaaaaaaaaaaaaagaauu

SEQ ID NO: 9467 - RNA, 1229 nt, Artificial Sequence
  mRNA Design i-3 (hSL-A64-N5) comprising derived and/or modified sequence from Pf(3D7)__XP_001351122.1__HsALB_Pf-CSP(19-272)_L(AAY)_Pf-CSP(310-3 27)_Linker (AAY)_Pf-CSP(346-397) (opt11)
aggagaaagcuuaccaugaaaugggucaccuucaucucacuccuguuccuauucucgagcgcauacucccucuuccaagaauaccagugcuacggcucaagcucaaacacacgcguacucaacgaacuaaacuacgacaacgccggaaccaaccucuacaacgaacuagaaaugaacuacuacggcaaacaagagaacugguacucucuaaagaaaaacagcagaucccugggcgagaacgacgacggaaacaacgaagacaacgagaaacuacgcaaacccaaacacaagaaacuaaaacaacccgcagauggaaacccagauccaaacgcaaacccaaacgucgacccuaacgcaaaccccaacguagaccccaacgcaaaccccaacguagacccaaacgccaacccaaacgccaacccaaacgccaacccgaacgcaaaccccaaugccaacccaaacgccaacccgaacgccaacccaaacgcgaaccccaacgccaacccaaacgcaaacccaaacgcaaacccuaacgcaaaccccaacgccaacccaaaugccaacccaaacgcaaacccaaacgcaaacccaaacgccaaccccaacguagacccaaacgcaaaccccaacgcaaacccaaacgcaaacccaaacgccaacccaaacgcaaacccaaacgcaaacccaaacgcaaacccgaacgccaaccccaacgcaaacccaaacgcaaacccaaacgccaacccaaacgccaacccaaacgcaaaccccaacgcaaaccccaacgccaaccccaacgccaacccaaacgcaaacccaaacgcaaacccagccgcauacgaacccucagacaaacacauaaaagaauaccucaauaaaauccaaaacucacuugcagccuacauaaaaccaggcagcgcgaacaaacccaaagacgaacucgacuacgcgaacgacauagaaaagaaaaucugcaaaauggaaaaaugcucauccgucuucaaugucguaaacucauccauaggccuaaucaugguccucuccuuccuauuccucaacuaaggacuaguuauaagacugacuagcccgaugggccucccaacgggcccuccuccccuccuugcaccgagauuaaucaaaggcucuuuucagagccaccaaaaaaaaaaaaaaaaaaaaaaaaaaaaaaaaaaaaaaaaaaaaaaaaaaaaaaaaaaaaaaaaagaauu

SEQ ID NO: 9468 - RNA, 1924 nt, Artificial Sequence
  mRNA Design a-1 (hSL-A100-N5) comprising derived and/or modified sequence from Pf(3D7)__XP_001351122.1__LumSynt_L(GGS4-GGG)_Pf-CSP(19-397) (opt1)
aggagagucccgcagucggcguccagcggcucugcuuguucgugugugugucguugcaggccuuauucaagcuuaccaugcagaucuacgagggcaagcugaccgccgaggggcuccgcuucggcaucguggccagccgguucaaccacgcgcuggucgaccgccugguggagggggccaucgacgccaucgugcggcacggcgggcgcgaggaggacaucacccucguccgggugcccggcuccugggagaucccgguggccgccggcgagcuggcccgcaaggaggacaucgacgcggucaucgccaucggggugcugauccggggcgccacgccccacuucgacuacaucgccagcgagguguccaaggggcucgcggaccugagccuggagcuccgcaagcccaucaccuucggcgucaucaccgccgacacccuggagcaggccaucgagcgggccgggacgaagcacggcaacaagggcugggaggccgcgcuguccgccaucgagauggccaaccucuucaagagccugcgcggcgggagcggcggguccggcgggagcggcggcuccgggggcgggcuguuccaggaguaccagugcuacggcuccagcuccaacacccgggugcucaacgagcugaacuacgacaacgcggggaccaaccuguacaacgagcucgagaugaacuacuacggcaagcaggagaacugguacagccugaagaagaacucccgcagccugggggagaacgacgacggcaacaacgaggacaacgagaagcuccggaagcccaagcacaagaagcugaagcagccggccgacgggaaccccgaccccaacgccaaccccaacguggacccgaacgccaaccccaacgucgaccccaacgccaaccccaacguggacccgaacgcgaaccccaacgccaaccccaacgccaaccccaacgccaacccgaacgcgaaccccaacgccaaccccaacgccaaccccaacgccaacccgaacgccaaccccaacgcgaaccccaacgccaaccccaacgccaacccgaacgccaaccccaacgccaaccccaacgcgaaccccaacgccaacccgaacgccaaccccaacguggaccccaacgccaaccccaacgccaacccgaacgcgaaccccaacgccaaccccaacgccaacccgaacgccaaccccaacgccaaccccaacgcgaaccccaacgccaacccgaacgccaaccccaacgccaaccccaacgcgaaccccaacgccaacccgaacgccaaccccaacgccaaccccaacgccaaccccaacgcgaacccgaacgccaaccccaacaagaacaaccagggcaacggccaggggcacaacaugcccaacgaccccaaccgcaacgucgacgagaacgccaacgccaacuccgccgugaagaacaacaacaacgaggagccgagcgacaagcacaucaaggaguaccugaacaagauccagaacucccucagcacggaguggucccccugcagcgugaccugcggcaacgggauccagguccggaucaagcccggcuccgcgaacaagcccaaggacgagcuggacuacgccaacgacaucgagaagaagaucugcaagauggagaagugcagcuccguguucaacguggucaacagcuccaucgggcugaucauggugcucagcuuccuguuccugaacugaggacuagucccuguucccagagcccacuuuuuuuucuuuuuuugaaauaaaauagccugucuuucagaucucaaaggcucuuuucagagccaccaaaaaaaaaaaaaaaaaaaaaaaaaaaaaaaaaaaaaaaaaaaaaaaaaaaaaaaaaaaaaaaaaaaaaaaaaaaaaaaaaaaaaaaaaaaaaaaaaaaaagaauu

SEQ ID NO: 9469 - RNA, 1471 nt, Artificial Sequence
  mRNA Design a-1 (hSL-A100-N5) comprising derived and/or modified sequence from Pf(3D7)__XP_001351122.1__HsALB_Pf-CSP(19-397) (opt1)
aggagagucccgcagucggcguccagcggcucugcuuguucgugugugugucguugcaggccuuauucaagcuuaccaugaagugggugaccuucaucagccuccuguuccuguucuccagcgccuacucccuguuccaggaguaccagugcuacggcuccagcuccaacacccgggugcucaacgagcugaacuacgacaacgcggggaccaaccuguacaacgagcucgagaugaacuacuacggcaagcaggagaacugguacagccugaagaagaacucccgcagccugggggagaacgacgacggcaacaacgaggacaacgagaagcuccggaagcccaagcacaagaagcugaagcagccggccgacgggaaccccgaccccaacgccaaccccaacguggacccgaacgccaaccccaacgucgaccccaacgccaaccccaacguggacccgaacgcgaaccccaacgccaaccccaacgccaaccccaacgccaacccgaacgcgaaccccaacgccaaccccaacgccaaccccaacgccaacccgaacgccaaccccaacgcgaaccccaacgccaaccccaacgccaacccgaacgccaaccccaacgccaaccccaacgcgaaccccaacgccaacccgaacgccaaccccaacguggaccccaacgccaaccccaacgccaacccgaacgcgaaccccaacgccaaccccaacgccaacccgaacgccaaccccaacgccaaccccaacgcgaaccccaacgccaacccgaacgccaaccccaacgccaaccccaacgcgaaccccaacgccaacccgaacgccaaccccaacgccaaccccaacgccaaccccaacgcgaacccgaacgccaaccccaacaagaacaaccagggcaacggccaggggcacaacaugcccaacgaccccaaccgcaacgucgacgagaacgccaacgccaacuccgccgugaagaacaacaacaacgaggagccgagcgacaagcacaucaaggaguaccugaacaagauccagaacucccucagcacggaguggucccccugcagcgugaccugcggcaacgggauccagguccggaucaagcccggcuccgcgaacaagcccaaggacgagcuggacuacgccaacgacaucgagaagaagaucugcaagauggagaagugcagcuccguguucaacguggucaacagcuccaucgggcugaucauggugcucagcuuccuguuccugaacugaggacuagucccuguucccagagcccacuuuuuuuucuuuuuuugaaauaaaauagccugucuuucagaucucaaaggcucuuuucagagccaccaaaaaaaaaaaaaaaaaaaaaaaaaaaaaaaaaaaaaaaaaaaaaaaaaaaaaaaaaaaaaaaaaaaaaaaaaaaaaaaaaaaaaaaaaaaaaaaaaaaaagaauu

SEQ ID NO: 9470 - RNA, 1786 nt, Artificial Sequence
  mRNA Design a-1 (hSL-A100-N5) comprising derived and/or modified sequence from Pf(3D7)__XP_001351122.1__HsALB_Pf-CSP(19-272)_L(PVTN)_HBsAg (opt1)
aggagagucccgcagucggcguccagcggcucugcuuguucgugugugugucguugcaggccuuauucaagcuuaccaugaagugggugaccuucaucagccugcucuuccuguucuccagcgccuacucccuguuccaggaguaccagugcuacggcuccagcuccaacacccgggugcucaacgagcugaacuacgacaacgcggggaccaaccuguacaacgagcucgagaugaacuacuacggcaagcaggagaacugguacagccugaagaagaacucccgcagccugggggagaacgacgacggcaacaacgaggacaacgagaagcuccggaagcccaagcacaagaagcugaagcagccggccgacgggaaccccgaccccaacgccaaccccaacguggacccgaacgccaaccccaacgucgaccccaacgccaaccccaacguggacccgaacgcgaaccccaacgccaaccccaacgccaaccccaacgccaacccgaacgcgaaccccaacgccaaccccaacgccaaccccaacgccaacccgaacgccaaccccaacgcgaaccccaacgccaaccccaacgccaacccgaacgccaaccccaacgccaaccccaacgcgaaccccaacgccaacccgaacgccaaccccaacguggaccccaacgccaaccccaacgccaacccgaacgcgaaccccaacgccaaccccaacgccaacccgaacgccaaccccaacgccaaccccaacgcgaaccccaacgccaacccgaacgccaaccccaacgccaaccccaacgcgaaccccaacgccaacccgaacgccaaccccaacgccaaccccaacgccaaccccaacgcgaacccgaacgccaaccccccggugacgaacauggagaacaucaccagcggcuuccuggggccccuccuggugcugcaggccggcuucuuccuccugacccgcauccugaccaucccgcagucccucgacagcugguggaccucccugaacuuccucgggggcagccccgucugccuggggcagaacucccagagccccaccuccaaccacagccccaccuccugcccgcccaucugccccggcuaccgguggaugugccugcgccgguucaucaucuuccuguucauccuccugcugugccucaucuuccugcuggugcuccuggacuaccagggcaugcugcccgugugcccgcucauccccgggagcacgaccaccaacaccggccccugcaagacgugcaccacccccgcccaggggaacuccauguucccgagcugcugcugcaccaagcccacggacggcaacugcacgugcauccccauccccuccagcugggcguucgccaaguaccugugggagugggccuccguccgcuucagcuggcugucccuccuggugccguucgugcagugguucgucgggcugagccccaccguguggcucuccgccaucuggaugaugugguacuggggccccagccuguacagcaucgugucccccuucaucccgcugcuccccaucuucuucugccugugggucuacaucugaggacuagucccuguucccagagcccacuuuuuuuucuuuuuuugaaauaaaauagccugucuuucagaucucaaaggcucuuuucagagccaccaaaaaaaaaaaaaaaaaaaaaaaaaaaaaaaaaaaaaaaaaaaaaaaaaaaaaaaaaaaaaaaaaaaaaaaaaaaaaaaaaaaaaaaaaaaaaaaaaaaaagaauu

SEQ ID NO: 9471 - RNA, 1903 nt, Artificial Sequence
  mRNA Design a-1 (hSL-A100-N5) comprising derived and/or modified sequence from Pf(3D7)__XP_001351122.1__HsALB_Pf-CSP(19-272)_L(AAY)_Pf-CSP(346-3 65)_L(AAY)_PADRE_L(PVTN)_HBsAg (opt1)
aggagagucccgcagucggcguccagcggcucugcuuguucgugugugugucguugcaggccuuauucaagcuuaccaugaagugggugaccuucaucagccugcucuuccuguucuccagcgccuacucccuguuccaggaguaccagugcuacggcuccagcuccaacacccgggugcucaacgagcugaacuacgacaacgcggggaccaaccuguacaacgagcucgagaugaacuacuacggcaagcaggagaacugguacagccugaagaagaacucccgcagccugggggagaacgacgacggcaacaacgaggacaacgagaagcuccggaagcccaagcacaagaagcugaagcagccggccgacgggaaccccgaccccaacgccaaccccaacguggacccgaacgccaaccccaacgucgaccccaacgccaaccccaacguggacccgaacgcgaaccccaacgccaaccccaacgccaaccccaacgccaacccgaacgcgaaccccaacgccaaccccaacgccaaccccaacgccaacccgaacgccaaccccaacgcgaaccccaacgccaaccccaacgccaacccgaacgccaaccccaacgccaaccccaacgcgaaccccaacgccaacccgaacgccaaccccaacguggaccccaacgccaaccccaacgccaacccgaacgcgaaccccaacgccaaccccaacgccaacccgaacgccaaccccaacgccaaccccaacgcgaaccccaacgccaacccgaacgccaaccccaacgccaaccccaacgcgaaccccaacgccaacccgaacgccaaccccaacgccaaccccaacgccaaccccaacgcgaacccgaacgccaaccccgccgcguauaucaagcccggcuccgcgaacaagcccaaggacgagcuggacuacgccaacgacaucgaggcggccuacgccaaguucguggccgccuggacccugaaggcggccgccccggugacgaacauggagaacaucaccagcggcuuccuggggccccuccuggugcugcaggccggcuucuuccuccugacccgcauccugaccaucccgcagucccucgacagcugguggaccucccugaacuuccucgggggcagccccgucugccuggggcagaacucccagagccccaccuccaaccacagccccaccuccugcccgcccaucugccccggcuaccgguggaugugccugcgccgguucaucaucuuccuguucauccuccugcugugccucaucuuccugcuggugcuccuggacuaccagggcaugcugcccgugugcccgcucauccccgggagcacgaccaccaacaccggccccugcaagacgugcaccacccccgcccaggggaacuccauguucccgagcugcugcugcaccaagcccacggacggcaacugcacgugcauccccauccccuccagcugggcguucgccaaguaccugugggagugggccuccguccgcuucagcuggcugucccuccuggugccguucgugcagugguucgucgggcugagccccaccguguggcucuccgccaucuggaugaugugguacuggggccccagccuguacagcaucgugucccccuucaucccgcugcuccccaucuucuucugccugugggucuacaucugaggacuagucccuguucccagagcccacuuuuuuuucuuuuuuugaaauaaaauagccugucuuucagaucucaaaggcucuuuucagagccaccaaaaaaaaaaaaaaaaaaaaaaaaaaaaaaaaaaaaaaaaaaaaaaaaaaaaaaaaaaaaaaaaaaaaaaaaaaaaaaaaaaaaaaaaaaaaaaaaaaaaagaauu

SEQ ID NO: 9472 - RNA, 1903 nt, Artificial Sequence
  mRNA Design a-1 (hSL-A100-N5) comprising derived and/or modified sequence from Pf(3D7)__XP_001351122.1__HsALB_Pf-CSP(19-272)_L(AAY)_Pf-CSP(346-3 65)_L(AAY)_PADRE_L(PVTN)_HBsAg (opt1)
aggagagucccgcagucggcguccagcggcucugcuuguucgugugugugucguugcaggccuuauucaagcuuaccaugaagugggugaccuucaucagccuccuguuccuguucuccagcgccuacucccuguuccaggaguaccagugcuacggcuccagcuccaacacccgggugcucaacgagcugaacuacgacaacgcggggaccaaccuguacaacgagcucgagaugaacuacuacggcaagcaggagaacugguacagccugaagaagaacucccgcagccugggggagaacgacgacggcaacaacgaggacaacgagaagcuccggaagcccaagcacaagaagcugaagcagccggccgacgggaaccccgaccccaacgccaaccccaacguggacccgaacgccaaccccaacgucgaccccaacgccaaccccaacguggacccgaacgcgaaccccaacgccaaccccaacgccaaccccaacgccaacccgaacgcgaaccccaacgccaaccccaacgccaaccccaacgccaacccgaacgccaaccccaacgcgaaccccaacgccaaccccaacgccaacccgaacgccaaccccaacgccaaccccaacgcgaaccccaacgccaacccgaacgccaaccccaacguggaccccaacgccaaccccaacgccaacccgaacgcgaaccccaacgccaaccccaacgccaacccgaacgccaaccccaacgccaaccccaacgcgaaccccaacgccaacccgaacgccaaccccaacgccaaccccaacgcgaaccccaacgccaacccgaacgccaaccccaacgccaaccccaacgccaaccccaacgcgaacccgaacgccaaccccgccgcguauaucaagcccggcuccgcgaacaagcccaaggacgagcuggacuacgccaacgacaucgaggcggccuacgccaaguucguggccgccuggacccugaaggcggccgccccggugacgaacauggagaacaucaccagcggcuuccuggggccccuccuggugcugcaggccggcuucuuccuccugacccgcauccugaccaucccgcagucccucgacagcugguggaccucccugaacuuccucgggggcagccccgucugccuggggcagaacucccagagccccaccuccaaccacagccccaccuccugcccgcccaucugccccggcuaccgguggaugugccugcgccgguucaucaucuuccuguucauccuccugcugugccucaucuuccugcuggugcuccuggacuaccagggcaugcugcccgugugcccgcucauccccgggagcacgaccaccaacaccggccccugcaagacgugcaccacccccgcccaggggaacuccauguucccgagcugcugcugcaccaagcccacggacggcaacugcacgugcauccccauccccuccagcugggcguucgccaaguaccugugggagugggccuccguccgcuucagcuggcugucccuccuggugccguucgugcagugguucgucgggcugagccccaccguguggcucuccgccaucuggaugaugugguacuggggccccagccuguacagcaucgugucccccuucaucccgcugcuccccaucuucuucugccugugggucuacaucugaggacuagucccuguucccagagcccacuuuuuuuucuuuuuuugaaauaaaauagccugucuuucagaucucaaaggcucuuuucagagccaccaaaaaaaaaaaaaaaaaaaaaaaaaaaaaaaaaaaaaaaaaaaaaaaaaaaaaaaaaaaaaaaaaaaaaaaaaaaaaaaaaaaaaaaaaaaaaaaaaaaaagaauu

SEQ ID NO: 9473 - RNA, 2122 nt, Artificial Sequence
  mRNA Design a-1 (hSL-A100-N5) comprising derived and/or modified sequence from Pf(3D7)__XP_001351122.1__HsALB_Pf-CSP(19-384)_L(PVTN)_HBsAg (opt1)
aggagagucccgcagucggcguccagcggcucugcuuguucgugugugugucguugcaggccuuauucaagcuuaccaugaagugggugaccuucaucagccugcucuuccuguucuccagcgccuacucccuguuccaggaguaccagugcuacggcuccagcuccaacacccgggugcucaacgagcugaacuacgacaacgcggggaccaaccuguacaacgagcucgagaugaacuacuacggcaagcaggagaacugguacagccugaagaagaacucccgcagccugggggagaacgacgacggcaacaacgaggacaacgagaagcuccggaagcccaagcacaagaagcugaagcagccggccgacgggaaccccgaccccaacgccaaccccaacguggacccgaacgccaaccccaacgucgaccccaacgccaaccccaacguggacccgaacgcgaaccccaacgccaaccccaacgccaaccccaacgccaacccgaacgcgaaccccaacgccaaccccaacgccaaccccaacgccaacccgaacgccaaccccaacgcgaaccccaacgccaaccccaacgccaacccgaacgccaaccccaacgccaaccccaacgcgaaccccaacgccaacccgaacgccaaccccaacguggaccccaacgccaaccccaacgccaacccgaacgcgaaccccaacgccaaccccaacgccaacccgaacgccaaccccaacgccaaccccaacgcgaaccccaacgccaacccgaacgccaaccccaacgccaaccccaacgcgaaccccaacgccaacccgaacgccaaccccaacgccaaccccaacgccaaccccaacgcgaacccgaacgccaaccccaacaagaacaaccagggcaacggccaggggcacaacaugcccaacgaccccaaccgcaacgucgacgagaacgccaacgccaacuccgccgugaagaacaacaacaacgaggagccgagcgacaagcacaucaaggaguaccugaacaagauccagaacucccucagcacggaguggucccccugcagcgugaccugcggcaacgggauccagguccggaucaagcccggcuccgcgaacaagcccaaggacgagcuggacuacgccaacgacaucgagaagaagaucugcaagauggagaagugcagcuccguguucaacguggucaacagcuccccggugacgaacauggagaacaucaccagcggcuuccuggggccccuccuggugcugcaggccggcuucuuccuccugacccgcauccugaccaucccgcagucccucgacagcugguggaccucccugaacuuccucgggggcagccccgucugccuggggcagaacucccagagccccaccuccaaccacagccccaccuccugcccgcccaucugccccggcuaccgguggaugugccugcgccgguucaucaucuuccuguucauccuccugcugugccucaucuuccugcuggugcuccuggacuaccagggcaugcugcccgugugcccgcucauccccgggagcacgaccaccaacaccggccccugcaagacgugcaccacccccgcccaggggaacuccauguucccgagcugcugcugcaccaagcccacggacggcaacugcacgugcauccccauccccuccagcugggcguucgccaaguaccugugggagugggccuccguccgcuucagcuggcugucccuccuggugccguucgugcagugguucgucgggcugagccccaccguguggcucuccgccaucuggaugaugugguacuggggccccagccuguacagcaucgugucccccuucaucccgcugcuccccaucuucuucugccugugggucuacaucugaggacuagucccuguucccagagcccacuuuuuuuucuuuuuuugaaauaaaauagccugucuuucagaucucaaaggcucuuuucagagccaccaaaaaaaaaaaaaaaaaaaaaaaaaaaaaaaaaaaaaaaaaaaaaaaaaaaaaaaaaaaaaaaaaaaaaaaaaaaaaaaaaaaaaaaaaaaaaaaaaaaaagaauu

SEQ ID NO: 9474 - RNA, 2122 nt, Artificial Sequence
  mRNA Design a-1 (hSL-A100-N5) comprising derived and/or modified sequence from Pf(3D7)__XP_001351122.1__HsALB_Pf-CSP(19-384)_L(PVTN)_HBsAg (opt1)
aggagagucccgcagucggcguccagcggcucugcuuguucgugugugugucguugcaggccuuauucaagcuuaccaugaagugggugaccuucaucagccuccuguuccuguucuccagcgccuacucccuguuccaggaguaccagugcuacggcuccagcuccaacacccgggugcucaacgagcugaacuacgacaacgcggggaccaaccuguacaacgagcucgagaugaacuacuacggcaagcaggagaacugguacagccugaagaagaacucccgcagccugggggagaacgacgacggcaacaacgaggacaacgagaagcuccggaagcccaagcacaagaagcugaagcagccggccgacgggaaccccgaccccaacgccaaccccaacguggacccgaacgccaaccccaacgucgaccccaacgccaaccccaacguggacccgaacgcgaaccccaacgccaaccccaacgccaaccccaacgccaacccgaacgcgaaccccaacgccaaccccaacgccaaccccaacgccaacccgaacgccaaccccaacgcgaaccccaacgccaaccccaacgccaacccgaacgccaaccccaacgccaaccccaacgcgaaccccaacgccaacccgaacgccaaccccaacguggaccccaacgccaaccccaacgccaacccgaacgcgaaccccaacgccaaccccaacgccaacccgaacgccaaccccaacgccaaccccaacgcgaaccccaacgccaacccgaacgccaaccccaacgccaaccccaacgcgaaccccaacgccaacccgaacgccaaccccaacgccaaccccaacgccaaccccaacgcgaacccgaacgccaaccccaacaagaacaaccagggcaacggccaggggcacaacaugcccaacgaccccaaccgcaacgucgacgagaacgccaacgccaacuccgccgugaagaacaacaacaacgaggagccgagcgacaagcacaucaaggaguaccugaacaagauccagaacucccucagcacggaguggucccccugcagcgugaccugcggcaacgggauccagguccggaucaagcccggcuccgcgaacaagcccaaggacgagcuggacuacgccaacgacaucgagaagaagaucugcaagauggagaagugcagcuccguguucaacguggucaacagcuccccggugacgaacauggagaacaucaccagcggcuuccuggggccccuccuggugcugcaggccggcuucuuccuccugacccgcauccugaccaucccgcagucccucgacagcugguggaccucccugaacuuccucgggggcagccccgucugccuggggcagaacucccagagccccaccuccaaccacagccccaccuccugcccgcccaucugccccggcuaccgguggaugugccugcgccgguucaucaucuuccuguucauccuccugcugugccucaucuuccugcuggugcuccuggacuaccagggcaugcugcccgugugcccgcucauccccgggagcacgaccaccaacaccggccccugcaagacgugcaccacccccgcccaggggaacuccauguucccgagcugcugcugcaccaagcccacggacggcaacugcacgugcauccccauccccuccagcugggcguucgccaaguaccugugggagugggccuccguccgcuucagcuggcugucccuccuggugccguucgugcagugguucgucgggcugagccccaccguguggcucuccgccaucuggaugaugugguacuggggccccagccuguacagcaucgugucccccuucaucccgcugcuccccaucuucuucugccugugggucuacaucugaggacuagucccuguucccagagcccacuuuuuuuucuuuuuuugaaauaaaauagccugucuuucagaucucaaaggcucuuuucagagccaccaaaaaaaaaaaaaaaaaaaaaaaaaaaaaaaaaaaaaaaaaaaaaaaaaaaaaaaaaaaaaaaaaaaaaaaaaaaaaaaaaaaaaaaaaaaaaaaaaaaaagaauu

SEQ ID NO: 9475 - RNA, 1939 nt, Artificial Sequence
  mRNA Design a-1 (hSL-A100-N5) comprising derived and/or modified sequence from Pf(3D7)__XP_001351122.1__HsALB_Pf-CSP(19-384)_L(SGG)_Ferritin (opt1)
aggagagucccgcagucggcguccagcggcucugcuuguucgugugugugucguugcaggccuuauucaagcuuaccaugaagugggugaccuucaucagccugcucuuccuguucuccagcgccuacucccuguuccaggaguaccagugcuacggcuccagcuccaacacccgggugcucaacgagcugaacuacgacaacgcggggaccaaccuguacaacgagcucgagaugaacuacuacggcaagcaggagaacugguacagccugaagaagaacucccgcagccugggggagaacgacgacggcaacaacgaggacaacgagaagcuccggaagcccaagcacaagaagcugaagcagccggccgacgggaaccccgaccccaacgccaaccccaacguggacccgaacgccaaccccaacgucgaccccaacgccaaccccaacguggacccgaacgcgaaccccaacgccaaccccaacgccaaccccaacgccaacccgaacgcgaaccccaacgccaaccccaacgccaaccccaacgccaacccgaacgccaaccccaacgcgaaccccaacgccaaccccaacgccaacccgaacgccaaccccaacgccaaccccaacgcgaaccccaacgccaacccgaacgccaaccccaacguggaccccaacgccaaccccaacgccaacccgaacgcgaaccccaacgccaaccccaacgccaacccgaacgccaaccccaacgccaaccccaacgcgaaccccaacgccaacccgaacgccaaccccaacgccaaccccaacgcgaaccccaacgccaacccgaacgccaaccccaacgccaaccccaacgccaaccccaacgcgaacccgaacgccaaccccaacaagaacaaccagggcaacggccaggggcacaacaugcccaacgaccccaaccgcaacgucgacgagaacgccaacgccaacuccgccgugaagaacaacaacaacgaggagccgagcgacaagcacaucaaggaguaccugaacaagauccagaacucccucagcacggaguggucccccugcagcgugaccugcggcaacgggauccagguccggaucaagcccggcuccgcgaacaagcccaaggacgagcuggacuacgccaacgacaucgagaagaagaucugcaagauggagaagugcagcuccguguucaacguggucaacagcuccagcggcgggcugagcaaggacaucaucaagcuccugaacgagcaggugaacaaggagaugaacuccagcaaccuguacauguccaugagcuccuggugcuacacccacagccucgacggcgccgggcuguuccuguucgaccacgccgcggaggaguacgagcacgccaagaagcucaucaucuuccugaacgagaacaacguccccgugcagcugaccuccaucagcgccccggagcacaaguucgagggccucacgcagaucuuccagaaggccuacgagcacgagcagcacaucuccgagagcaucaacaacaucguggaccacgccaucaaguccaaggaccacgcgaccuucaacuuccugcagugguacgucgccgagcagcacgaggaggaggugcuguucaaggacauccucgacaagaucgagcugaucgggaacgagaaccacggccuguaccucgccgaccaguacgugaaggggaucgccaagagccgcaaguccugaggacuagucccuguucccagagcccacuuuuuuuucuuuuuuugaaauaaaauagccugucuuucagaucucaaaggcucuuuucagagccaccaaaaaaaaaaaaaaaaaaaaaaaaaaaaaaaaaaaaaaaaaaaaaaaaaaaaaaaaaaaaaaaaaaaaaaaaaaaaaaaaaaaaaaaaaaaaaaaaaaaaagaauu

SEQ ID NO: 9476 - RNA, 1939 nt, Artificial Sequence
  mRNA Design a-1 (hSL-A100-N5) comprising derived and/or modified sequence from Pf(3D7)__XP_001351122.1__HsALB_Pf-CSP(19-384)_L(SGG)_Ferritin (opt1)
aggagagucccgcagucggcguccagcggcucugcuuguucgugugugugucguugcaggccuuauucaagcuuaccaugaagugggugaccuucaucagccuccuguuccuguucuccagcgccuacucccuguuccaggaguaccagugcuacggcuccagcuccaacacccgggugcucaacgagcugaacuacgacaacgcggggaccaaccuguacaacgagcucgagaugaacuacuacggcaagcaggagaacugguacagccugaagaagaacucccgcagccugggggagaacgacgacggcaacaacgaggacaacgagaagcuccggaagcccaagcacaagaagcugaagcagccggccgacgggaaccccgaccccaacgccaaccccaacguggacccgaacgccaaccccaacgucgaccccaacgccaaccccaacguggacccgaacgcgaaccccaacgccaaccccaacgccaaccccaacgccaacccgaacgcgaaccccaacgccaaccccaacgccaaccccaacgccaacccgaacgccaaccccaacgcgaaccccaacgccaaccccaacgccaacccgaacgccaaccccaacgccaaccccaacgcgaaccccaacgccaacccgaacgccaaccccaacguggaccccaacgccaaccccaacgccaacccgaacgcgaaccccaacgccaaccccaacgccaacccgaacgccaaccccaacgccaaccccaacgcgaaccccaacgccaacccgaacgccaaccccaacgccaaccccaacgcgaaccccaacgccaacccgaacgccaaccccaacgccaaccccaacgccaaccccaacgcgaacccgaacgccaaccccaacaagaacaaccagggcaacggccaggggcacaacaugcccaacgaccccaaccgcaacgucgacgagaacgccaacgccaacuccgccgugaagaacaacaacaacgaggagccgagcgacaagcacaucaaggaguaccugaacaagauccagaacucccucagcacggaguggucccccugcagcgugaccugcggcaacgggauccagguccggaucaagcccggcuccgcgaacaagcccaaggacgagcuggacuacgccaacgacaucgagaagaagaucugcaagauggagaagugcagcuccguguucaacguggucaacagcuccagcggcgggcugagcaaggacaucaucaagcuccugaacgagcaggugaacaaggagaugaacuccagcaaccuguacauguccaugagcuccuggugcuacacccacagccucgacggcgccgggcuguuccuguucgaccacgccgcggaggaguacgagcacgccaagaagcucaucaucuuccugaacgagaacaacguccccgugcagcugaccuccaucagcgccccggagcacaaguucgagggccucacgcagaucuuccagaaggccuacgagcacgagcagcacaucuccgagagcaucaacaacaucguggaccacgccaucaaguccaaggaccacgcgaccuucaacuuccugcagugguacgucgccgagcagcacgaggaggaggugcuguucaaggacauccucgacaagaucgagcugaucgggaacgagaaccacggccuguaccucgccgaccaguacgugaaggggaucgccaagagccgcaaguccugaggacuagucccuguucccagagcccacuuuuuuuucuuuuuuugaaauaaaauagccugucuuucagaucucaaaggcucuuuucagagccaccaaaaaaaaaaaaaaaaaaaaaaaaaaaaaaaaaaaaaaaaaaaaaaaaaaaaaaaaaaaaaaaaaaaaaaaaaaaaaaaaaaaaaaaaaaaaaaaaaaaaagaauu

SEQ ID NO: 9477 - RNA, 1900 nt, Artificial Sequence
  mRNA Design a-1 (hSL-A100-N5) comprising derived and/or modified sequence from Pf(3D7)__XP_001351122.1__HsALB_Pf-CSP(93-384)_L(PVTN)_HBsAg (opt1)
aggagagucccgcagucggcguccagcggcucugcuuguucgugugugugucguugcaggccuuauucaagcuuaccaugaagugggugaccuucaucagccugcucuuccuguucuccagcgccuacuccaagcugaagcagccggccgacgggaaccccgaccccaacgccaaccccaacguggacccgaacgccaaccccaacgucgaccccaacgccaaccccaacguggacccgaacgcgaaccccaacgccaaccccaacgccaaccccaacgccaacccgaacgcgaaccccaacgccaaccccaacgccaaccccaacgccaacccgaacgccaaccccaacgcgaaccccaacgccaaccccaacgccaacccgaacgccaaccccaacgccaaccccaacgcgaaccccaacgccaacccgaacgccaaccccaacguggaccccaacgccaaccccaacgccaacccgaacgcgaaccccaacgccaaccccaacgccaacccgaacgccaaccccaacgccaaccccaacgcgaaccccaacgccaacccgaacgccaaccccaacgccaaccccaacgcgaaccccaacgccaacccgaacgccaaccccaacgccaaccccaacgccaaccccaacgcgaacccgaacgccaaccccaacaagaacaaccagggcaacggccaggggcacaacaugcccaacgaccccaaccgcaacgucgacgagaacgccaacgccaacuccgccgugaagaacaacaacaacgaggagccgagcgacaagcacaucaaggaguaccugaacaagauccagaacucccucagcacggaguggucccccugcagcgugaccugcggcaacgggauccagguccggaucaagcccggcuccgcgaacaagcccaaggacgagcuggacuacgccaacgacaucgagaagaagaucugcaagauggagaagugcagcuccguguucaacguggucaacagcuccccggugacgaacauggagaacaucaccagcggcuuccuggggccccuccuggugcugcaggccggcuucuuccuccugacccgcauccugaccaucccgcagucccucgacagcugguggaccucccugaacuuccucgggggcagccccgucugccuggggcagaacucccagagccccaccuccaaccacagccccaccuccugcccgcccaucugccccggcuaccgguggaugugccugcgccgguucaucaucuuccuguucauccuccugcugugccucaucuuccugcuggugcuccuggacuaccagggcaugcugcccgugugcccgcucauccccgggagcacgaccaccaacaccggccccugcaagacgugcaccacccccgcccaggggaacuccauguucccgagcugcugcugcaccaagcccacggacggcaacugcacgugcauccccauccccuccagcugggcguucgccaaguaccugugggagugggccuccguccgcuucagcuggcugucccuccuggugccguucgugcagugguucgucgggcugagccccaccguguggcucuccgccaucuggaugaugugguacuggggccccagccuguacagcaucgugucccccuucaucccgcugcuccccaucuucuucugccugugggucuacaucugaggacuagucccuguucccagagcccacuuuuuuuucuuuuuuugaaauaaaauagccugucuuucagaucucaaaggcucuuuucagagccaccaaaaaaaaaaaaaaaaaaaaaaaaaaaaaaaaaaaaaaaaaaaaaaaaaaaaaaaaaaaaaaaaaaaaaaaaaaaaaaaaaaaaaaaaaaaaaaaaaaaaagaauu

SEQ ID NO: 9478 - RNA, 1900 nt, Artificial Sequence
  mRNA Design a-1 (hSL-A100-N5) comprising derived and/or modified sequence from Pf(3D7)__XP_001351122.1__HsALB_Pf-CSP(93-384)_L(PVTN)_HBsAg (opt1)
aggagagucccgcagucggcguccagcggcucugcuuguucgugugugugucguugcaggccuuauucaagcuuaccaugaagugggugaccuucaucagccuccuguuccuguucuccagcgccuacuccaagcugaagcagccggccgacgggaaccccgaccccaacgccaaccccaacguggacccgaacgccaaccccaacgucgaccccaacgccaaccccaacguggacccgaacgcgaaccccaacgccaaccccaacgccaaccccaacgccaacccgaacgcgaaccccaacgccaaccccaacgccaaccccaacgccaacccgaacgccaaccccaacgcgaaccccaacgccaaccccaacgccaacccgaacgccaaccccaacgccaaccccaacgcgaaccccaacgccaacccgaacgccaaccccaacguggaccccaacgccaaccccaacgccaacccgaacgcgaaccccaacgccaaccccaacgccaacccgaacgccaaccccaacgccaaccccaacgcgaaccccaacgccaacccgaacgccaaccccaacgccaaccccaacgcgaaccccaacgccaacccgaacgccaaccccaacgccaaccccaacgccaaccccaacgcgaacccgaacgccaaccccaacaagaacaaccagggcaacggccaggggcacaacaugcccaacgaccccaaccgcaacgucgacgagaacgccaacgccaacuccgccgugaagaacaacaacaacgaggagccgagcgacaagcacaucaaggaguaccugaacaagauccagaacucccucagcacggaguggucccccugcagcgugaccugcggcaacgggauccagguccggaucaagcccggcuccgcgaacaagcccaaggacgagcuggacuacgccaacgacaucgagaagaagaucugcaagauggagaagugcagcuccguguucaacguggucaacagcuccccggugacgaacauggagaacaucaccagcggcuuccuggggccccuccuggugcugcaggccggcuucuuccuccugacccgcauccugaccaucccgcagucccucgacagcugguggaccucccugaacuuccucgggggcagccccgucugccuggggcagaacucccagagccccaccuccaaccacagccccaccuccugcccgcccaucugccccggcuaccgguggaugugccugcgccgguucaucaucuuccuguucauccuccugcugugccucaucuuccugcuggugcuccuggacuaccagggcaugcugcccgugugcccgcucauccccgggagcacgaccaccaacaccggccccugcaagacgugcaccacccccgcccaggggaacuccauguucccgagcugcugcugcaccaagcccacggacggcaacugcacgugcauccccauccccuccagcugggcguucgccaaguaccugugggagugggccuccguccgcuucagcuggcugucccuccuggugccguucgugcagugguucgucgggcugagccccaccguguggcucuccgccaucuggaugaugugguacuggggccccagccuguacagcaucgugucccccuucaucccgcugcuccccaucuucuucugccugugggucuacaucugaggacuagucccuguucccagagcccacuuuuuuuucuuuuuuugaaauaaaauagccugucuuucagaucucaaaggcucuuuucagagccaccaaaaaaaaaaaaaaaaaaaaaaaaaaaaaaaaaaaaaaaaaaaaaaaaaaaaaaaaaaaaaaaaaaaaaaaaaaaaaaaaaaaaaaaaaaaaaaaaaaaaagaauu

SEQ ID NO: 9479 - RNA, 1561 nt, Artificial Sequence; identical to SEQ ID NO: 7316
  mRNA Design a-1 (hSL-A100-N5) comprising derived and/or modified sequence from Pf(3D7)__XP_001351122.1__HsALB_Pf-CSP(199-377)_L(PVTN)_HBsAg (opt1)

SEQ ID NO: 9480 - RNA, 1258 nt, Artificial Sequence
  mRNA Design a-1 (hSL-A100-N5) comprising derived and/or modified sequence from Pf(3D7)__XP_001351122.1__HsALB_Pf-CSP(19-272)_L(AAY)_Pf-CSP(310-3 27)_L(AAY)_Pf-CSP(346-375) (opt1)
aggagagucccgcagucggcguccagcggcucugcuuguucgugugugugucguugcaggccuuauucaagcuuaccaugaagugggugaccuucaucagccuccuguuccuguucuccagcgccuacucccuguuccaggaguaccagugcuacggcuccagcuccaacacccgggugcucaacgagcugaacuacgacaacgcggggaccaaccuguacaacgagcucgagaugaacuacuacggcaagcaggagaacugguacagccugaagaagaacucccgcagccugggggagaacgacgacggcaacaacgaggacaacgagaagcuccggaagcccaagcacaagaagcugaagcagccggccgacgggaaccccgaccccaacgccaaccccaacguggacccgaacgccaaccccaacgucgaccccaacgccaaccccaacguggacccgaacgcgaaccccaacgccaaccccaacgccaaccccaacgccaacccgaacgcgaaccccaacgccaaccccaacgccaaccccaacgccaacccgaacgccaaccccaacgcgaaccccaacgccaaccccaacgccaacccgaacgccaaccccaacgccaaccccaacgcgaaccccaacgccaacccgaacgccaaccccaacguggaccccaacgccaaccccaacgccaacccgaacgcgaaccccaacgccaaccccaacgccaacccgaacgccaaccccaacgccaaccccaacgcgaaccccaacgccaacccgaacgccaaccccaacgccaaccccaacgcgaaccccaacgccaacccgaacgccaaccccaacgccaaccccaacgccaaccccaacgcgaacccgaacgccaaccccgccgcguaugagccgagcgacaagcacaucaaggaguaccugaacaagauccagaacucccucgcggccuacaucaagcccggcuccgcgaacaagcccaaggacgagcuggacuacgccaacgacaucgagaagaagaucugcaagauggagaagugcagcugaggacuagucccuguucccagagcccacuuuuuuuucuuuuuuugaaauaaaauagccugucuuucagaucucaaaggcucuuuucagagccaccaaaaaaaaaaaaaaaaaaaaaaaaaaaaaaaaaaaaaaaaaaaaaaaaaaaaaaaaaaaaaaaaaaaaaaaaaaaaaaaaaaaaaaaaaaaaaaaaaaaaagaauu

SEQ ID NO: 9481 - RNA, 1258 nt, Artificial Sequence
  mRNA Design a-1 (hSL-A100-N5) comprising derived and/or modified sequence from Pf(3D7)__XP_001351122.1__HsALB_Pf-CSP(19-272)_L(AAY)_Pf-CSP(346-3 75)_L(AAY)_Pf-CSP(310-327) (opt1)
aggagagucccgcagucggcguccagcggcucugcuuguucgugugugugucguugcaggccuuauucaagcuuaccaugaagugggugaccuucaucagccuccuguuccuguucuccagcgccuacucccuguuccaggaguaccagugcuacggcuccagcuccaacacccgggugcucaacgagcugaacuacgacaacgcggggaccaaccuguacaacgagcucgagaugaacuacuacggcaagcaggagaacugguacagccugaagaagaacucccgcagccugggggagaacgacgacggcaacaacgaggacaacgagaagcuccggaagcccaagcacaagaagcugaagcagccggccgacgggaaccccgaccccaacgccaaccccaacguggacccgaacgccaaccccaacgucgaccccaacgccaaccccaacguggacccgaacgcgaaccccaacgccaaccccaacgccaaccccaacgccaacccgaacgcgaaccccaacgccaaccccaacgccaaccccaacgccaacccgaacgccaaccccaacgcgaaccccaacgccaaccccaacgccaacccgaacgccaaccccaacgccaaccccaacgcgaaccccaacgccaacccgaacgccaaccccaacguggaccccaacgccaaccccaacgccaacccgaacgcgaaccccaacgccaaccccaacgccaacccgaacgccaaccccaacgccaaccccaacgcgaaccccaacgccaacccgaacgccaaccccaacgccaaccccaacgcgaaccccaacgccaacccgaacgccaaccccaacgccaaccccaacgccaaccccaacgcgaacccgaacgccaaccccgcggccuacaucaagcccggcuccgcgaacaagcccaaggacgagcuggacuacgccaacgacaucgagaagaagaucugcaagauggagaagugcagcgccgcguaugagccgagcgacaagcacaucaaggaguaccugaacaagauccagaacucccucugaggacuagucccuguucccagagcccacuuuuuuuucuuuuuuugaaauaaaauagccugucuuucagaucucaaaggcucuuuucagagccaccaaaaaaaaaaaaaaaaaaaaaaaaaaaaaaaaaaaaaaaaaaaaaaaaaaaaaaaaaaaaaaaaaaaaaaaaaaaaaaaaaaaaaaaaaaaaaaaaaaaaagaauu

SEQ ID NO: 9482 - RNA, 1306 nt, Artificial Sequence
  mRNA Design a-1 (hSL-A100-N5) comprising derived and/or modified sequence from Pf(3D7)__XP_001351122.1__HsALB_Pf-CSP(19-272)_L(AAY)_Pf-CSP(346-3 75)_L(AAY)_Pf-CSP(310-327)_L(AAY)_PADRE (opt1)
aggagagucccgcagucggcguccagcggcucugcuuguucgugugugugucguugcaggccuuauucaagcuuaccaugaagugggugaccuucaucagccuccuguuccuguucuccagcgccuacucccuguuccaggaguaccagugcuacggcuccagcuccaacacccgggugcucaacgagcugaacuacgacaacgcggggaccaaccuguacaacgagcucgagaugaacuacuacggcaagcaggagaacugguacagccugaagaagaacucccgcagccugggggagaacgacgacggcaacaacgaggacaacgagaagcuccggaagcccaagcacaagaagcugaagcagccggccgacgggaaccccgaccccaacgccaaccccaacguggacccgaacgccaaccccaacgucgaccccaacgccaaccccaacguggacccgaacgcgaaccccaacgccaaccccaacgccaaccccaacgccaacccgaacgcgaaccccaacgccaaccccaacgccaaccccaacgccaacccgaacgccaaccccaacgcgaaccccaacgccaaccccaacgccaacccgaacgccaaccccaacgccaaccccaacgcgaaccccaacgccaacccgaacgccaaccccaacguggaccccaacgccaaccccaacgccaacccgaacgcgaaccccaacgccaaccccaacgccaacccgaacgccaaccccaacgccaaccccaacgcgaaccccaacgccaacccgaacgccaaccccaacgccaaccccaacgcgaaccccaacgccaacccgaacgccaaccccaacgccaaccccaacgccaaccccaacgcgaacccgaacgccaaccccgccgcguauaucaagcccggcuccgcgaacaagcccaaggacgagcuggacuacgccaacgacaucgagaagaagaucugcaagauggagaagugcagcgcggccuacgagccgagcgacaagcacaucaaggaguaccugaacaagauccagaacucccucgccgccuacgccaaguucguggccgccuggacccugaaggcggccgccugaggacuagucccuguucccagagcccacuuuuuuuucuuuuuuugaaauaaaauagccugucuuucagaucucaaaggcucuuuucagagccaccaaaaaaaaaaaaaaaaaaaaaaaaaaaaaaaaaaaaaaaaaaaaaaaaaaaaaaaaaaaaaaaaaaaaaaaaaaaaaaaaaaaaaaaaaaaaaaaaaaaaagaauu

SEQ ID NO: 9483 - RNA, 1306 nt, Artificial Sequence
  mRNA Design a-1 (hSL-A100-N5) comprising derived and/or modified sequence from Pf(3D7)__XP_001351122.1__HsALB_Pf-CSP(19-272)_L(AAY)_Pf-CSP(310-3 27)_L(AAY)_Pf-CSP(346-375)_L(AAY)_PADRE (opt1)
aggagagucccgcagucggcguccagcggcucugcuuguucgugugugugucguugcaggccuuauucaagcuuaccaugaagugggugaccuucaucagccuccuguuccuguucuccagcgccuacucccuguuccaggaguaccagugcuacggcuccagcuccaacacccgggugcucaacgagcugaacuacgacaacgcggggaccaaccuguacaacgagcucgagaugaacuacuacggcaagcaggagaacugguacagccugaagaagaacucccgcagccugggggagaacgacgacggcaacaacgaggacaacgagaagcuccggaagcccaagcacaagaagcugaagcagccggccgacgggaaccccgaccccaacgccaaccccaacguggacccgaacgccaaccccaacgucgaccccaacgccaaccccaacguggacccgaacgcgaaccccaacgccaaccccaacgccaaccccaacgccaacccgaacgcgaaccccaacgccaaccccaacgccaaccccaacgccaacccgaacgccaaccccaacgcgaaccccaacgccaaccccaacgccaacccgaacgccaaccccaacgccaaccccaacgcgaaccccaacgccaacccgaacgccaaccccaacguggaccccaacgccaaccccaacgccaacccgaacgcgaaccccaacgccaaccccaacgccaacccgaacgccaaccccaacgccaaccccaacgcgaaccccaacgccaacccgaacgccaaccccaacgccaaccccaacgcgaaccccaacgccaacccgaacgccaaccccaacgccaaccccaacgccaaccccaacgcgaacccgaacgccaaccccgccgcguaugagccgagcgacaagcacaucaaggaguaccugaacaagauccagaacucccucgcggccuacaucaagcccggcuccgcgaacaagcccaaggacgagcuggacuacgccaacgacaucgagaagaagaucugcaagauggagaagugcagcgccgccuacgccaaguucguggccgccuggacccugaaggcggccgccugaggacuagucccuguucccagagcccacuuuuuuuucuuuuuuugaaauaaaauagccugucuuucagaucucaaaggcucuuuucagagccaccaaaaaaaaaaaaaaaaaaaaaaaaaaaaaaaaaaaaaaaaaaaaaaaaaaaaaaaaaaaaaaaaaaaaaaaaaaaaaaaaaaaaaaaaaaaaaaaaaaaaagaauu

SEQ ID NO: 9484 - RNA, 1360 nt, Artificial Sequence
  mRNA Design a-1 (hSL-A100-N5) comprising derived and/or modified sequence from Pf(3D7)__XP_001351122.1__HsALB_Pf-CSP(19-272)_L(AAY)_Pf-CSP(310-3 27)_L(AAY)_Pf-CSP(346-375)_L(AAY)_PADRE_L(AAY)_P2 (opt1)
aggagagucccgcagucggcguccagcggcucugcuuguucgugugugugucguugcaggccuuauucaagcuuaccaugaagugggugaccuucaucagccuccuguuccuguucuccagcgccuacucccuguuccaggaguaccagugcuacggcuccagcuccaacacccgggugcucaacgagcugaacuacgacaacgcggggaccaaccuguacaacgagcucgagaugaacuacuacggcaagcaggagaacugguacagccugaagaagaacucccgcagccugggggagaacgacgacggcaacaacgaggacaacgagaagcuccggaagcccaagcacaagaagcugaagcagccggccgacgggaaccccgaccccaacgccaaccccaacguggacccgaacgccaaccccaacgucgaccccaacgccaaccccaacguggacccgaacgcgaaccccaacgccaaccccaacgccaaccccaacgccaacccgaacgcgaaccccaacgccaaccccaacgccaaccccaacgccaacccgaacgccaaccccaacgcgaaccccaacgccaaccccaacgccaacccgaacgccaaccccaacgccaaccccaacgcgaaccccaacgccaacccgaacgccaaccccaacguggaccccaacgccaaccccaacgccaacccgaacgcgaaccccaacgccaaccccaacgccaacccgaacgccaaccccaacgccaaccccaacgcgaaccccaacgccaacccgaacgccaaccccaacgccaaccccaacgcgaaccccaacgccaacccgaacgccaaccccaacgccaaccccaacgccaaccccaacgcgaacccgaacgccaaccccgcggccuacgagccgagcgacaagcacaucaaggaguaccugaacaagauccagaacucccucgccgcguauaucaagcccggcuccgcgaacaagcccaaggacgagcuggacuacgccaacgacaucgagaagaagaucugcaagauggagaagugcagcgccgccuacgccaaguucguggccgccuggacccugaaggcggccgccgccgcuuaccaguacaucaaggccaacagcaaguucaucggcaucaccgagcugugaggacuagucccuguucccagagcccacuuuuuuuucuuuuuuugaaauaaaauagccugucuuucagaucucaaaggcucuuuucagagccaccaaaaaaaaaaaaaaaaaaaaaaaaaaaaaaaaaaaaaaaaaaaaaaaaaaaaaaaaaaaaaaaaaaaaaaaaaaaaaaaaaaaaaaaaaaaaaaaaaaaaagaauu

SEQ ID NO: 9485 - RNA, 1324 nt, Artificial Sequence
  mRNA Design a-1 (hSL-A100-N5) comprising derived and/or modified sequence from Pf(3D7)__XP_001351122.1__HsALB_Pf-CSP(19-272)_L(AAY)_Pf-CSP(310-3 27)_Linker (AAY)_Pf-CSP(346-397) (opt1)
aggagagucccgcagucggcguccagcggcucugcuuguucgugugugugucguugcaggccuuauucaagcuuaccaugaagugggugaccuucaucagccuccuguuccuguucuccagcgccuacucccuguuccaggaguaccagugcuacggcuccagcuccaacacccgggugcucaacgagcugaacuacgacaacgcggggaccaaccuguacaacgagcucgagaugaacuacuacggcaagcaggagaacugguacagccugaagaagaacucccgcagccugggggagaacgacgacggcaacaacgaggacaacgagaagcuccggaagcccaagcacaagaagcugaagcagccggccgacgggaaccccgaccccaacgccaaccccaacguggacccgaacgccaaccccaacgucgaccccaacgccaaccccaacguggacccgaacgcgaaccccaacgccaaccccaacgccaaccccaacgccaacccgaacgcgaaccccaacgccaaccccaacgccaaccccaacgccaacccgaacgccaaccccaacgcgaaccccaacgccaaccccaacgccaacccgaacgccaaccccaacgccaaccccaacgcgaaccccaacgccaacccgaacgccaaccccaacguggaccccaacgccaaccccaacgccaacccgaacgcgaaccccaacgccaaccccaacgccaacccgaacgccaaccccaacgccaaccccaacgcgaaccccaacgccaacccgaacgccaaccccaacgccaaccccaacgcgaaccccaacgccaacccgaacgccaaccccaacgccaaccccaacgccaaccccaacgcgaacccgaacgccaaccccgcggccuacgagccgagcgacaagcacaucaaggaguaccugaacaagauccagaacucccucgccgcguauaucaagcccggcuccgcgaacaagcccaaggacgagcuggacuacgccaacgacaucgagaagaagaucugcaagauggagaagugcagcuccguguucaacguggucaacagcuccaucgggcugaucauggugcucagcuuccuguuccugaacugaggacuagucccuguucccagagcccacuuuuuuuucuuuuuuugaaauaaaauagccugucuuucagaucucaaaggcucuuuucagagccaccaaaaaaaaaaaaaaaaaaaaaaaaaaaaaaaaaaaaaaaaaaaaaaaaaaaaaaaaaaaaaaaaaaaaaaaaaaaaaaaaaaaaaaaaaaaaaaaaaaaaagaauu

SEQ ID NO: 9486 - RNA, 1924 nt, Artificial Sequence
  mRNA Design a-1 (hSL-A100-N5) comprising derived and/or modified sequence from Pf(3D7)__XP_001351122.1__LumSynt_L(GGS4-GGG)_Pf-CSP(19-397) (opt1)
aggagagucccgcagucggcguccagcggcucugcuuguucgugugugugucguugcaggccuuauucaagcuuaccaugcagaucuacgagggcaagcugaccgccgaggggcuccgcuucggcaucguggccagccgguucaaccacgcgcuggucgaccgccugguggagggggccaucgacgccaucgugcggcacggcgggcgcgaggaggacaucacccucguccgggugcccggcuccugggagaucccgguggccgccggcgagcuggcgcgcaaggaggacaucgacgccgucaucgccaucggggugcugauccggggcgccacgccccacuucgacuacaucgcgagcgagguguccaaggggcucgccgaccugagccuggagcuccgcaagcccaucaccuucggcgucaucaccgccgacacccuggagcaggccaucgagcgggccgggacgaagcacggcaacaagggcugggaggcggcccuguccgccaucgagauggccaaccucuucaagagccugcgcgggggcuccgggggcagcggcggguccggcgggagcggcgggggccuguuccaggaguaccagugcuacggcuccagcuccaacacccgggugcucaacgagcugaacuacgacaacgccgggaccaaccuguacaacgagcucgagaugaacuacuacggcaagcaggagaacugguacagccugaagaagaacucccgcagccugggggagaacgacgacggcaacaacgaggacaacgagaagcuccggaagcccaagcacaagaagcugaagcagccggcggacgggaaccccgaccccaacgccaaccccaacguggacccgaacgccaaccccaacgucgaccccaacgccaaccccaacguggacccgaacgccaaccccaacgcgaaccccaacgccaaccccaacgccaacccgaacgccaaccccaacgccaaccccaacgcgaaccccaacgccaacccgaacgccaaccccaacgccaaccccaacgcgaaccccaacgccaacccgaacgccaaccccaacgccaaccccaacgccaaccccaacgcgaacccgaacgccaaccccaacguggaccccaacgccaacccgaacgccaaccccaacgccaaccccaacgcgaaccccaacgccaacccgaacgccaaccccaacgccaaccccaacgccaaccccaacgcgaacccgaacgccaaccccaacgccaaccccaacgccaaccccaacgcgaacccgaacgccaaccccaacgccaaccccaacgccaaccccaacgccaacccgaacgcgaaccccaacaagaacaaccagggcaacggccaggggcacaacaugcccaacgaccccaaccgcaacgucgacgagaacgccaacgccaacuccgccgugaagaacaacaacaacgaggagccgagcgacaagcacaucaaggaguaccugaacaagauccagaacucccucagcaccgaguggagccccugcuccgugacgugcggcaacgggauccagguccggaucaagcccggcagcgccaacaagcccaaggacgagcuggacuacgcgaacgacaucgagaagaagaucugcaagauggagaagugcuccagcguguucaacguggucaacuccagcaucgggcugaucauggugcucuccuuccuguuccugaacugaggacuagucccuguucccagagcccacuuuuuuuucuuuuuuugaaauaaaauagccugucuuucagaucucaaaggcucuuuucagagccaccaaaaaaaaaaaaaaaaaaaaaaaaaaaaaaaaaaaaaaaaaaaaaaaaaaaaaaaaaaaaaaaaaaaaaaaaaaaaaaaaaaaaaaaaaaaaaaaaaaaaagaauu

SEQ ID NO: 9487 - RNA, 1786 nt, Artificial Sequence
  mRNA Design a-1 (hSL-A100-N5) comprising derived and/or modified sequence from Pf(3D7)__XP_001351122.1__HsALB_Pf-CSP(19-272)_L(PVTN)_HBsAg (opt1)
aggagagucccgcagucggcguccagcggcucugcuuguucgugugugugucguugcaggccuuauucaagcuuaccaugaagugggugaccuucaucagccuccuguuccuguucuccagcgccuacucccuguuccaggaguaccagugcuacggcagcuccagcaacacccgcguccucaacgagcugaacuacgacaacgccgggaccaaccuguacaacgagcucgagaugaacuacuacggcaagcaggagaacugguacucccugaagaagaacagccggucccugggggagaacgacgacggcaacaacgaggacaacgagaagcuccgcaagcccaagcacaagaagcugaagcagccggcggacgggaaccccgaccccaacgccaaccccaacguggacccgaacgccaaccccaacguggaccccaacgccaaccccaacgucgacccgaacgccaaccccaacgcgaaccccaacgccaaccccaacgccaacccgaacgccaaccccaacgcgaaccccaacgccaaccccaacgccaacccgaacgccaaccccaacgccaaccccaacgcgaaccccaacgccaacccgaacgccaaccccaacgccaaccccaacgccaaccccaacgcgaacccgaacgccaaccccaacguggaccccaacgccaaccccaacgccaacccgaacgccaaccccaacgcgaaccccaacgccaacccgaacgccaaccccaacgccaaccccaacgccaaccccaacgcgaacccgaacgccaaccccaacgccaaccccaacgccaaccccaacgcgaacccgaacgccaaccccaacgccaaccccaacgccaaccccaacgccaacccgaacgcgaacccgcccgugaccaacauggagaacaucaccagcggcuuccugggcccccuccugguccugcaggccggguucuuccuccugacccggauccugacgaucccccagucccucgacagcugguggaccucccugaacuuccugggcgggagccccgugugccucggccagaacucccagagccccaccuccaaccacagccccaccuccugcccgcccaucugccccggguaccgcuggaugugccugcggcgcuucaucaucuuccuguucauccuccugcugugccucaucuuccugcuggugcuccuggacuaccagggcaugcugcccgucugcccgcucauccccggcagcacgaccaccaacaccgggcccugcaagacgugcaccaccccggcccagggcaacagcauguuccccuccugcugcugcaccaagcccacggacgggaacugcacgugcauccccaucccgagcuccugggccuucgccaaguaccugugggagugggcgagcgugcgguucuccuggcugagccuccuggugcccuucguccagugguucgugggccugucccccaccguguggcucagcgccaucuggaugaugugguacuggggccccucccuguacagcaucgucuccccguucaucccccugcuccccaucuucuucugccuguggguguacaucugaggacuagucccuguucccagagcccacuuuuuuuucuuuuuuugaaauaaaauagccugucuuucagaucucaaaggcucuuuucagagccaccaaaaaaaaaaaaaaaaaaaaaaaaaaaaaaaaaaaaaaaaaaaaaaaaaaaaaaaaaaaaaaaaaaaaaaaaaaaaaaaaaaaaaaaaaaaaaaaaaaaaagaauu

SEQ ID NO: 9488 - RNA, 1903 nt, Artificial Sequence
  mRNA Design a-1 (hSL-A100-N5) comprising derived and/or modified sequence from Pf(3D7)__XP_001351122.1__HsALB_Pf-CSP(19-272)_L(AAY)_Pf-CSP(346-3 65)_L(AAY)_PADRE_L(PVTN)_HBsAg (opt1)
aggagagucccgcagucggcguccagcggcucugcuuguucgugugugugucguugcaggccuuauucaagcuuaccaugaagugggugaccuucaucagccugcuguuccuguucuccagcgccuacucccuguuccaggaguaccagugcuacggcagcuccagcaacacccgcguccucaacgagcugaacuacgacaacgccgggaccaaccuguacaacgagcucgagaugaacuacuacggcaagcaggagaacugguacucccugaagaagaacagccggucccugggggagaacgacgacggcaacaacgaggacaacgagaagcuccgcaagcccaagcacaagaagcugaagcagccggcggacgggaaccccgaccccaacgccaaccccaacguggacccgaacgccaaccccaacguggaccccaacgccaaccccaacgucgacccgaacgccaaccccaacgcgaaccccaacgccaaccccaacgccaacccgaacgccaaccccaacgcgaaccccaacgccaaccccaacgccaacccgaacgccaaccccaacgccaaccccaacgcgaaccccaacgccaacccgaacgccaaccccaacgccaaccccaacgccaaccccaacgcgaacccgaacgccaaccccaacguggaccccaacgccaaccccaacgccaacccgaacgccaaccccaacgcgaaccccaacgccaacccgaacgccaaccccaacgccaaccccaacgccaaccccaacgcgaacccgaacgccaaccccaacgccaaccccaacgccaaccccaacgcgaacccgaacgccaaccccaacgccaaccccaacgccaaccccaacgccaacccgaacgcgaaccccgccgccuacaucaagcccggcagcgccaacaagcccaaggacgagcuggacuacgccaacgacaucgaggcggccuacgccaaguucguggccgccuggacccucaaggcggccgccccggucaccaacauggagaacaucaccuccggcuuccuggggccccugcucgugcugcaggccggcuucuuccugcucacgcggauccugaccaucccccagagccuggacuccugguggaccagccucaacuuccucgggggcucccccgugugccuggggcagaacagccaguccccgaccagcaaccacucccccacgagcugcccgcccaucugccccggcuaccgcuggaugugccuccggcgcuucaucaucuuccuguucauccugcuccugugccugaucuuccuccugguccugcucgacuaccagggcaugcugcccgugugcccccugaucccggggagcaccaccaccaacacgggccccugcaagaccugcaccacccccgcgcaggggaacuccauguuccccagcugcugcugcacgaagccgaccgacggcaacugcacgugcauccccauccccuccagcugggccuucgccaaguaccucugggagugggccuccgugcgguucagcuggcugucccugcucguccccuucgugcagugguucgugggccugagcccgaccgucuggcuguccgccaucuggaugaugugguacugggggcccagccucuacuccaucgugagccccuucaucccccugcugccgaucuucuucugccucuggguguacaucugaggacuagucccuguucccagagcccacuuuuuuuucuuuuuuugaaauaaaauagccugucuuucagaucucaaaggcucuuuucagagccaccaaaaaaaaaaaaaaaaaaaaaaaaaaaaaaaaaaaaaaaaaaaaaaaaaaaaaaaaaaaaaaaaaaaaaaaaaaaaaaaaaaaaaaaaaaaaaaaaaaaaagaauu

SEQ ID NO: 9489 - RNA, 2122 nt, Artificial Sequence
  mRNA Design a-1 (hSL-A100-N5) comprising derived and/or modified sequence from Pf(3D7)__XP_001351122.1__HsALB_Pf-CSP(19-384)_L(PVTN)_HBsAg (opt1)
aggagagucccgcagucggcguccagcggcucugcuuguucgugugugugucguugcaggccuuauucaagcuuaccaugaagugggugaccuucaucagccugcuguuccuguucuccagcgccuacucccuguuccaggaguaccagugcuacggcagcuccagcaacacccgcguccucaacgagcugaacuacgacaacgccgggacgaaccuguacaacgagcucgagaugaacuacuacggcaagcaggagaacugguacucccugaagaagaacagccggucccugggggagaacgacgacggcaacaacgaggacaacgagaagcuccgcaagcccaagcacaagaagcugaagcagccggcggacgggaaccccgaccccaacgccaaccccaacguggacccgaacgccaaccccaacguggaccccaacgccaaccccaacgucgacccgaacgccaaccccaacgcgaaccccaacgccaaccccaacgccaacccgaacgccaaccccaacgcgaaccccaacgccaaccccaacgccaacccgaacgccaaccccaacgccaaccccaacgcgaaccccaacgccaacccgaacgccaaccccaacgccaaccccaacgccaaccccaacgcgaacccgaacgccaaccccaacguggaccccaacgccaaccccaacgccaacccgaacgccaaccccaacgcgaaccccaacgccaacccgaacgccaaccccaacgccaaccccaacgccaaccccaacgcgaacccgaacgccaaccccaacgccaaccccaacgccaaccccaacgcgaacccgaacgccaaccccaacgccaaccccaacgccaaccccaacgccaacccgaacgcgaaccccaacaagaacaaccagggcaacggccaggggcacaacaugcccaacgaccccaaccggaacguggacgagaacgccaacgccaacagcgccgucaagaacaacaacaacgaggagccguccgacaagcacaucaaggaguaccugaacaagauccagaacagccucuccaccgaguggagccccugcuccgugaccugcggcaacgggauccaggugcgcaucaagcccggcagcgccaacaagcccaaggacgagcuggacuacgcgaacgacaucgagaagaagaucugcaagauggagaagugcuccagcgucuucaacguggugaacuccagcccggucaccaacauggagaacaucacgagcggguuccugggcccccuccuggugcugcaggccggcuucuuccuccugacccggauccugaccaucccccagucccucgacagcugguggaccucccugaacuuccucgggggcagccccgugugccucgggcagaacucccagagcccgacguccaaccacagccccaccuccugcccgcccaucugccccggcuaccgcuggaugugccugcggcgcuucaucaucuuccuguucauccuccugcugugccucaucuuccugcugguccuccuggacuaccagggcaugcugcccgugugcccccucaucccggggagcaccaccacgaacaccggccccugcaagaccugcaccacgcccgcccaggggaacuccauguuccccagcugcugcugcaccaagccgaccgacggcaacugcacgugcauccccauccccuccagcugggccuucgccaaguaccugugggagugggcguccgugcgguucagcuggcugucccuccugguccccuucgugcagugguucguggggcugagcccgaccgucuggcucuccgccaucuggaugaugugguacuggggccccagccuguacagcaucgugucccccuucaucccccugcucccgaucuucuucugccuguggguguacaucugaggacuagucccuguucccagagcccacuuuuuuuucuuuuuuugaaauaaaauagccugucuuucagaucucaaaggcucuuuucagagccaccaaaaaaaaaaaaaaaaaaaaaaaaaaaaaaaaaaaaaaaaaaaaaaaaaaaaaaaaaaaaaaaaaaaaaaaaaaaaaaaaaaaaaaaaaaaaaaaaaaaaagaauu

SEQ ID NO: 9490 - RNA, 1939 nt, Artificial Sequence
  mRNA Design a-1 (hSL-A100-N5) comprising derived and/or modified sequence from Pf(3D7)__XP_001351122.1__HsALB_Pf-CSP(19-384)_L(SGG)_Ferritin (opt1)
aggagagucccgcagucggcguccagcggcucugcuuguucgugugugugucguugcaggccuuauucaagcuuaccaugaagugggugaccuucaucagccuccuguuccuguucuccagcgccuacucccuguuccaggaguaccagugcuacggcagcuccagcaacacccggguccucaacgagcugaacuacgacaacgccgggacgaaccuguacaacgagcucgagaugaacuacuacggcaagcaggagaacugguacucccugaagaagaacagccggucccugggggagaacgacgacggcaacaacgaggacaacgagaagcuccgcaagcccaagcacaagaagcugaagcagccggcggacgggaaccccgaccccaacgccaaccccaacguggacccgaacgccaaccccaacguggaccccaacgccaaccccaacgucgacccgaacgccaaccccaacgcgaaccccaacgccaaccccaacgccaacccgaacgccaaccccaacgcgaaccccaacgccaaccccaacgccaacccgaacgccaaccccaacgccaaccccaacgcgaaccccaacgccaacccgaacgccaaccccaacgccaaccccaacgccaaccccaacgcgaacccgaacgccaaccccaacguggaccccaacgccaaccccaacgccaacccgaacgccaaccccaacgcgaaccccaacgccaacccgaacgccaaccccaacgccaaccccaacgccaaccccaacgcgaacccgaacgccaaccccaacgccaaccccaacgccaaccccaacgcgaacccgaacgccaaccccaacgccaaccccaacgccaaccccaacgccaacccgaacgcgaaccccaacaagaacaaccagggcaacggccaggggcacaacaugcccaacgaccccaaccggaacguggacgagaacgccaacgccaacagcgccgucaagaacaacaacaacgaggagccguccgacaagcacaucaaggaguaccugaacaagauccagaacagccucuccaccgaguggagccccugcuccgugaccugcggcaacgggauccaggugcgcaucaagcccggcagcgccaacaagcccaaggacgagcuggacuacgcgaacgacaucgagaagaagaucugcaagauggagaagugcuccagcgucuucaacguggugaacuccagcagcgggggccuguccaaggacaucaucaagcuccugaacgagcaggucaacaaggagaugaacagcuccaaccuguacaugagcauguccagcuggugcuacacccacucccucgacggcgccgggcuguuccuguucgaccacgccgccgaggaguacgagcacgccaagaagcucaucaucuuccugaacgagaacaacgugccggugcagcugacgagcaucuccgcgcccgagcacaaguucgagggccucacccagaucuuccagaaggccuacgagcacgagcagcacaucagcgaguccaucaacaacaucgucgaccacgccaucaagagcaaggaccacgccaccuucaacuuccugcagugguacguggcggagcagcacgaggaggaggugcuguucaaggacauccucgacaagaucgagcugaucgggaacgagaaccacggccuguaccucgccgaccaguacgucaagggcaucgccaagucccgcaagagcugaggacuagucccuguucccagagcccacuuuuuuuucuuuuuuugaaauaaaauagccugucuuucagaucucaaaggcucuuuucagagccaccaaaaaaaaaaaaaaaaaaaaaaaaaaaaaaaaaaaaaaaaaaaaaaaaaaaaaaaaaaaaaaaaaaaaaaaaaaaaaaaaaaaaaaaaaaaaaaaaaaaaagaauu

SEQ ID NO: 9491 - RNA, 1900 nt, Artificial Sequence
  mRNA Design a-1 (hSL-A100-N5) comprising derived and/or modified sequence from Pf(3D7)__XP_001351122.1__HsALB_Pf-CSP(93-384)_L(PVTN)_HBsAg (opt1)
aggagagucccgcagucggcguccagcggcucugcuuguucgugugugugucguugcaggccuuauucaagcuuaccaugaagugggugaccuucaucagccuccuguuccuguucuccagcgccuacuccaagcugaagcagcccgccgacggcaacccggaccccaacgcgaaccccaacgucgaccccaacgccaacccgaacguggaccccaacgccaaccccaacguggaccccaacgccaacccgaacgccaaccccaacgcgaaccccaacgccaaccccaacgccaacccgaacgccaaccccaacgcgaaccccaacgccaaccccaacgccaacccgaacgccaaccccaacgccaaccccaacgcgaaccccaacgccaacccgaacgccaaccccaacgccaaccccaacgccaaccccaacgcgaacccgaacgucgaccccaacgccaaccccaacgccaaccccaacgccaacccgaacgccaaccccaacgcgaaccccaacgccaacccgaacgccaaccccaacgccaaccccaacgccaaccccaacgcgaacccgaacgccaaccccaacgccaaccccaacgccaaccccaacgcgaacccgaacgccaaccccaacgccaaccccaacgccaaccccaacgccaacccgaacaagaacaaccaggggaacggccaggggcacaacaugcccaacgaccccaaccgcaacguggacgagaacgcgaacgccaacagcgccgugaagaacaacaacaacgaggagcccuccgacaagcacaucaaggaguaccucaacaagauccagaacagccuguccaccgaguggagcccgugcuccgugaccugcggcaacgggauccagguccggaucaagcccggcagcgccaacaagcccaaggacgagcuggacuacgccaacgacaucgagaagaagaucugcaagauggagaagugcuccagcguguucaacgucgugaacuccagccccgugaccaacauggagaacaucaccuccggcuuccucgggccgcugcugguccuccaggcgggcuucuuccugcugacccgcauccucacgaucccccagagccuggacuccugguggaccagccugaacuuccucgggggcucccccgugugccuggggcagaacagccagagccccaccuccaaccacagcccgaccuccugcccgcccaucugccccggcuaccgguggaugugccugcgccgguucaucaucuuccucuucauccugcugcucugccugaucuuccugcucgugcugcuggacuaccagggcaugcuccccgucugcccccugauccccgggagcacgaccaccaacaccggcccgugcaagacgugcaccacccccgcccaggggaacuccauguuccccagcugcugcugcaccaagcccacggacggcaacugcacgugcaucccgauccccuccagcugggccuucgccaaguaccugugggagugggccuccgugcgcuucagcuggcucucccugcuggugcccuucguccagugguucgugggccucagccccaccguguggcuguccgcgaucuggaugaugugguacugggggccgagccuguacuccaucgucagccccuucaucccccuccugcccaucuucuucugccuguggguguacaucugaggacuagucccuguucccagagcccacuuuuuuuucuuuuuuugaaauaaaauagccugucuuucagaucucaaaggcucuuuucagagccaccaaaaaaaaaaaaaaaaaaaaaaaaaaaaaaaaaaaaaaaaaaaaaaaaaaaaaaaaaaaaaaaaaaaaaaaaaaaaaaaaaaaaaaaaaaaaaaaaaaaaagaauu

SEQ ID NO: 9492 - RNA, 1561 nt, Artificial Sequence; identical to SEQ ID NO: 7346
  mRNA Design a-1 (hSL-A100-N5) comprising derived and/or modified sequence from Pf(3D7)__XP_001351122.1__HsALB_Pf-CSP(199-377)_L(PVTN)_HBsAg (opt1)

SEQ ID NO: 9493 - RNA, 1258 nt, Artificial Sequence
  mRNA Design a-1 (hSL-A100-N5) comprising derived and/or modified sequence from Pf(3D7)__XP_001351122.1__HsALB_Pf-CSP(19-272)_L(AAY)_Pf-CSP(346-3 75)_L(AAY)_Pf-CSP(310-327) (opt1)
aggagagucccgcagucggcguccagcggcucugcuuguucgugugugugucguugcaggccuuauucaagcuuaccaugaagugggugaccuucaucagccuccuguuccuguucuccagcgccuacucccuguuccaggaguaccagugcuacggcagcuccagcaacacccgcguccucaacgagcugaacuacgacaacgccgggacgaaccuguacaacgagcucgagaugaacuacuacggcaagcaggagaacugguacucccugaagaagaacagccggucccugggggagaacgacgacggcaacaacgaggacaacgagaagcuccgcaagcccaagcacaagaagcugaagcagccggcggacgggaaccccgaccccaacgccaaccccaacguggacccgaacgccaaccccaacguggaccccaacgccaaccccaacgucgacccgaacgccaaccccaacgcgaaccccaacgccaaccccaacgccaacccgaacgccaaccccaacgcgaaccccaacgccaaccccaacgccaacccgaacgccaaccccaacgccaaccccaacgcgaaccccaacgccaacccgaacgccaaccccaacgccaaccccaacgccaaccccaacgcgaacccgaacgccaaccccaacguggaccccaacgccaaccccaacgccaacccgaacgccaaccccaacgcgaaccccaacgccaacccgaacgccaaccccaacgccaaccccaacgccaaccccaacgcgaacccgaacgccaaccccaacgccaaccccaacgccaaccccaacgcgaacccgaacgccaaccccaacgccaaccccaacgccaaccccaacgccaacccgaacgcgaaccccgccgccuacaucaagcccggcagcgccaacaagcccaaggacgagcuggacuacgccaacgacaucgagaagaagaucugcaagauggagaagugcuccgcggccuacgagccgagcgacaagcacaucaaggaguaccucaacaagauccagaacucccugugaggacuagucccuguucccagagcccacuuuuuuuucuuuuuuugaaauaaaauagccugucuuucagaucucaaaggcucuuuucagagccaccaaaaaaaaaaaaaaaaaaaaaaaaaaaaaaaaaaaaaaaaaaaaaaaaaaaaaaaaaaaaaaaaaaaaaaaaaaaaaaaaaaaaaaaaaaaaaaaaaaaaagaauu

SEQ ID NO: 9494 - RNA, 1306 nt, Artificial Sequence
  mRNA Design a-1 (hSL-A100-N5) comprising derived and/or modified sequence from Pf(3D7)__XP_001351122.1__HsALB_Pf-CSP(19-272)_L(AAY)_Pf-CSP(346-3 75)_L(AAY)_Pf-CSP(310-327)_L(AAY)_PADRE (opt1)
aggagagucccgcagucggcguccagcggcucugcuuguucgugugugugucguugcaggccuuauucaagcuuaccaugaagugggugaccuucaucagccuccuguuccuguucuccagcgccuacucccuguuccaggaguaccagugcuacggcagcuccagcaacacccgcguccucaacgagcugaacuacgacaacgccgggacgaaccuguacaacgagcucgagaugaacuacuacggcaagcaggagaacugguacucccugaagaagaacagccggucccugggggagaacgacgacggcaacaacgaggacaacgagaagcuccgcaagcccaagcacaagaagcugaagcagccggcggacgggaaccccgaccccaacgccaaccccaacguggacccgaacgccaaccccaacguggaccccaacgccaaccccaacgucgacccgaacgccaaccccaacgcgaaccccaacgccaaccccaacgccaacccgaacgccaaccccaacgcgaaccccaacgccaaccccaacgccaacccgaacgccaaccccaacgccaaccccaacgcgaaccccaacgccaacccgaacgccaaccccaacgccaaccccaacgccaaccccaacgcgaacccgaacgccaaccccaacguggaccccaacgccaaccccaacgccaacccgaacgccaaccccaacgcgaaccccaacgccaacccgaacgccaaccccaacgccaaccccaacgccaaccccaacgcgaacccgaacgccaaccccaacgccaaccccaacgccaaccccaacgcgaacccgaacgccaaccccaacgccaaccccaacgccaaccccaacgccaacccgaacgcgaaccccgccgccuacaucaagcccggcagcgccaacaagcccaaggacgagcuggacuacgccaacgacaucgagaagaagaucugcaagauggagaagugcuccgcggccuacgagccgagcgacaagcacaucaaggaguaccucaacaagauccagaacucccuggccgccuacgccaaguucguggcggccuggacccugaaggccgccgcgugaggacuagucccuguucccagagcccacuuuuuuuucuuuuuuugaaauaaaauagccugucuuucagaucucaaaggcucuuuucagagccaccaaaaaaaaaaaaaaaaaaaaaaaaaaaaaaaaaaaaaaaaaaaaaaaaaaaaaaaaaaaaaaaaaaaaaaaaaaaaaaaaaaaaaaaaaaaaaaaaaaaaagaauu

SEQ ID NO: 9495 - RNA, 1306 nt, Artificial Sequence
  mRNA Design a-1 (hSL-A100-N5) comprising derived and/or modified sequence from Pf(3D7)__XP_001351122.1__HsALB_Pf-CSP(19-272)_L(AAY)_Pf-CSP(310-3 27)_L(AAY)_Pf-CSP(346-375)_L(AAY)_PADRE (opt1)
aggagagucccgcagucggcguccagcggcucugcuuguucgugugugugucguugcaggccuuauucaagcuuaccaugaagugggugaccuucaucagccuccuguuccuguucuccagcgccuacucccuguuccaggaguaccagugcuacggcagcuccagcaacacccgcguccucaacgagcugaacuacgacaacgccgggacgaaccuguacaacgagcucgagaugaacuacuacggcaagcaggagaacugguacucccugaagaagaacagccggucccugggggagaacgacgacggcaacaacgaggacaacgagaagcuccgcaagcccaagcacaagaagcugaagcagccggcggacgggaaccccgaccccaacgccaaccccaacguggacccgaacgccaaccccaacguggaccccaacgccaaccccaacgucgacccgaacgccaaccccaacgcgaaccccaacgccaaccccaacgccaacccgaacgccaaccccaacgcgaaccccaacgccaaccccaacgccaacccgaacgccaaccccaacgccaaccccaacgcgaaccccaacgccaacccgaacgccaaccccaacgccaaccccaacgccaaccccaacgcgaacccgaacgccaaccccaacguggaccccaacgccaaccccaacgccaacccgaacgccaaccccaacgcgaaccccaacgccaacccgaacgccaaccccaacgccaaccccaacgccaaccccaacgcgaacccgaacgccaaccccaacgccaaccccaacgccaaccccaacgcgaacccgaacgccaaccccaacgccaaccccaacgccaaccccaacgccaacccgaacgcgaaccccgccgccuacgagcccagcgacaagcacaucaaggaguaccugaacaagauccagaacucccucgccgccuacaucaagcccggcagcgcgaacaagccgaaggacgagcuggacuacgccaacgacaucgagaagaagaucugcaagauggagaagugcuccgccgccuacgccaaguucguggcggccuggacccugaaggccgccgcgugaggacuagucccuguucccagagcccacuuuuuuuucuuuuuuugaaauaaaauagccugucuuucagaucucaaaggcucuuuucagagccaccaaaaaaaaaaaaaaaaaaaaaaaaaaaaaaaaaaaaaaaaaaaaaaaaaaaaaaaaaaaaaaaaaaaaaaaaaaaaaaaaaaaaaaaaaaaaaaaaaaaaagaauu

SEQ ID NO: 9496 - RNA, 1360 nt, Artificial Sequence
  mRNA Design a-1 (hSL-A100-N5) comprising derived and/or modified sequence from Pf(3D7)__XP_001351122.1__HsALB_Pf-CSP(19-272)_L(AAY)_Pf-CSP(310-3 27)_L(AAY)_Pf-CSP(346-375)_L(AAY)_PADRE_L(AAY)_P2 (opt1)
aggagagucccgcagucggcguccagcggcucugcuuguucgugugugugucguugcaggccuuauucaagcuuaccaugaagugggugaccuucaucagccuccuguuccuguucuccagcgccuacucccuguuccaggaguaccagugcuacggcagcuccagcaacacccgcguccucaacgagcugaacuacgacaacgccgggacgaaccuguacaacgagcucgagaugaacuacuacggcaagcaggagaacugguacucccugaagaagaacagccggucccugggggagaacgacgacggcaacaacgaggacaacgagaagcuccgcaagcccaagcacaagaagcugaagcagccggcggacgggaaccccgaccccaacgccaaccccaacguggacccgaacgccaaccccaacguggaccccaacgccaaccccaacgucgacccgaacgccaaccccaacgcgaaccccaacgccaaccccaacgccaacccgaacgccaaccccaacgcgaaccccaacgccaaccccaacgccaacccgaacgccaaccccaacgccaaccccaacgcgaaccccaacgccaacccgaacgccaaccccaacgccaaccccaacgccaaccccaacgcgaacccgaacgccaaccccaacguggaccccaacgccaaccccaacgccaacccgaacgccaaccccaacgcgaaccccaacgccaacccgaacgccaaccccaacgccaaccccaacgccaaccccaacgcgaacccgaacgccaaccccaacgccaaccccaacgccaaccccaacgcgaacccgaacgccaaccccaacgccaaccccaacgccaaccccaacgccaacccgaacgcgaaccccgccgccuacgagcccagcgacaagcacaucaaggaguaccugaacaagauccagaacucccucgccgccuacaucaagcccggcagcgcgaacaagccgaaggacgagcuggacuacgccaacgacaucgagaagaagaucugcaagauggagaagugcuccgccgccuacgccaaguucguggcggccuggacccugaaggccgccgcggccgccuaccaguacaucaaggccaacagcaaguucaucggcaucaccgagcucugaggacuagucccuguucccagagcccacuuuuuuuucuuuuuuugaaauaaaauagccugucuuucagaucucaaaggcucuuuucagagccaccaaaaaaaaaaaaaaaaaaaaaaaaaaaaaaaaaaaaaaaaaaaaaaaaaaaaaaaaaaaaaaaaaaaaaaaaaaaaaaaaaaaaaaaaaaaaaaaaaaaaagaauu

SEQ ID NO: 9497 - RNA, 1324 nt, Artificial Sequence
  mRNA Design a-1 (hSL-A100-N5) comprising derived and/or modified sequence from Pf(3D7)__XP_001351122.1__HsALB_Pf-CSP(19-272)_L(AAY)_Pf-CSP(310-3 27)_Linker (AAY)_Pf-CSP(346-397) (opt1)
aggagagucccgcagucggcguccagcggcucugcuuguucgugugugugucguugcaggccuuauucaagcuuaccaugaagugggugaccuucaucagccuccuguuccuguucuccagcgccuacucccuguuccaggaguaccagugcuacggcagcuccagcaacacccgcguccucaacgagcugaacuacgacaacgccgggacgaaccuguacaacgagcucgagaugaacuacuacggcaagcaggagaacugguacucccugaagaagaacagccggucccugggggagaacgacgacggcaacaacgaggacaacgagaagcuccgcaagcccaagcacaagaagcugaagcagccggcggacgggaaccccgaccccaacgccaaccccaacguggacccgaacgccaaccccaacguggaccccaacgccaaccccaacgucgacccgaacgccaaccccaacgcgaaccccaacgccaaccccaacgccaacccgaacgccaaccccaacgcgaaccccaacgccaaccccaacgccaacccgaacgccaaccccaacgccaaccccaacgcgaaccccaacgccaacccgaacgccaaccccaacgccaaccccaacgccaaccccaacgcgaacccgaacgccaaccccaacguggaccccaacgccaaccccaacgccaacccgaacgccaaccccaacgcgaaccccaacgccaacccgaacgccaaccccaacgccaaccccaacgccaaccccaacgcgaacccgaacgccaaccccaacgccaaccccaacgccaaccccaacgcgaacccgaacgccaaccccaacgccaaccccaacgccaaccccaacgccaacccgaacgcgaaccccgccgccuacgagcccagcgacaagcacaucaaggaguaccugaacaagauccagaacucccucgccgccuacaucaagcccggcagcgcgaacaagccgaaggacgagcuggacuacgccaacgacaucgagaagaagaucugcaagauggagaagugcuccagcguguucaacgucgugaacuccagcaucggccugaucauggugcucuccuuccuguuccugaacugaggacuagucccuguucccagagcccacuuuuuuuucuuuuuuugaaauaaaauagccugucuuucagaucucaaaggcucuuuucagagccaccaaaaaaaaaaaaaaaaaaaaaaaaaaaaaaaaaaaaaaaaaaaaaaaaaaaaaaaaaaaaaaaaaaaaaaaaaaaaaaaaaaaaaaaaaaaaaaaaaaaaagaauu

SEQ ID NO: 9498 - RNA, 1924 nt, Artificial Sequence
  mRNA Design a-1 (hSL-A100-N5) comprising derived and/or modified sequence from Pf(3D7)__XP_001351122.1__LumSynt_L(GGS4-GGG)_Pf-CSP(19-397) (opt2)
aggagagucccgcagucggcguccagcggcucugcuuguucgugugugugucguugcaggccuuauucaagcuuaccaugcagaucuacgagggcaagcucaccgccgagggccuccgcuucggcaucgucgccucccgcuucaaccacgcccucgucgaccgccucgucgagggcgccaucgacgccaucguccgccacggcggccgcgaggaggacaucacccucguccgcguccccggcuccugggagauccccgucgccgccggcgagcucgcccgcaaggaggacaucgacgccgucaucgccaucggcguccucauccgcggcgccaccccccacuucgacuacaucgccuccgaggucuccaagggccucgccgaccucucccucgagcuccgcaagcccaucaccuucggcgucaucaccgccgacacccucgagcaggccaucgagcgcgccggcaccaagcacggcaacaagggcugggaggccgcccucuccgccaucgagauggccaaccucuucaagucccuccgcggcggcuccggcggcuccggcggcuccggcggcuccggcggcggccucuuccaggaguaccagugcuacggcuccuccuccaacacccgcguccucaacgagcucaacuacgacaacgccggcaccaaccucuacaacgagcucgagaugaacuacuacggcaagcaggagaacugguacucccucaagaagaacucccgcucccucggcgagaacgacgacggcaacaacgaggacaacgagaagcuccgcaagcccaagcacaagaagcucaagcagcccgccgacggcaaccccgaccccaacgccaaccccaacgucgaccccaacgccaaccccaacgucgaccccaacgccaaccccaacgucgaccccaacgccaaccccaacgccaaccccaacgccaaccccaacgccaaccccaacgccaaccccaacgccaaccccaacgccaaccccaacgccaaccccaacgccaaccccaacgccaaccccaacgccaaccccaacgccaaccccaacgccaaccccaacgccaaccccaacgccaaccccaacgccaaccccaacgccaaccccaacgucgaccccaacgccaaccccaacgccaaccccaacgccaaccccaacgccaaccccaacgccaaccccaacgccaaccccaacgccaaccccaacgccaaccccaacgccaaccccaacgccaaccccaacgccaaccccaacgccaaccccaacgccaaccccaacgccaaccccaacgccaaccccaacgccaaccccaacgccaaccccaacgccaaccccaacaagaacaaccagggcaacggccagggccacaacaugcccaacgaccccaaccgcaacgucgacgagaacgccaacgccaacuccgccgucaagaacaacaacaacgaggagcccuccgacaagcacaucaaggaguaccucaacaagauccagaacucccucuccaccgaguggucccccugcuccgucaccugcggcaacggcauccagguccgcaucaagcccggcuccgccaacaagcccaaggacgagcucgacuacgccaacgacaucgagaagaagaucugcaagauggagaagugcuccuccgucuucaacgucgucaacuccuccaucggccucaucaugguccucuccuuccucuuccucaacugaggacuagucccuguucccagagcccacuuuuuuuucuuuuuuugaaauaaaauagccugucuuucagaucucaaaggcucuuuucagagccaccaaaaaaaaaaaaaaaaaaaaaaaaaaaaaaaaaaaaaaaaaaaaaaaaaaaaaaaaaaaaaaaaaaaaaaaaaaaaaaaaaaaaaaaaaaaaaaaaaaaaagaauu

SEQ ID NO: 9499 - RNA, 1786 nt, Artificial Sequence
  mRNA Design a-1 (hSL-A100-N5) comprising derived and/or modified sequence from Pf(3D7)__XP_001351122.1__HsALB_Pf-CSP(19-272)_L(PVTN)_HBsAg (opt2)
aggagagucccgcagucggcguccagcggcucugcuuguucgugugugugucguugcaggccuuauucaagcuuaccaugaagugggucaccuucaucucccuccucuuccucuucuccuccgccuacucccucuuccaggaguaccagugcuacggcuccuccuccaacacccgcguccucaacgagcucaacuacgacaacgccggcaccaaccucuacaacgagcucgagaugaacuacuacggcaagcaggagaacugguacucccucaagaagaacucccgcucccucggcgagaacgacgacggcaacaacgaggacaacgagaagcuccgcaagcccaagcacaagaagcucaagcagcccgccgacggcaaccccgaccccaacgccaaccccaacgucgaccccaacgccaaccccaacgucgaccccaacgccaaccccaacgucgaccccaacgccaaccccaacgccaaccccaacgccaaccccaacgccaaccccaacgccaaccccaacgccaaccccaacgccaaccccaacgccaaccccaacgccaaccccaacgccaaccccaacgccaaccccaacgccaaccccaacgccaaccccaacgccaaccccaacgccaaccccaacgccaaccccaacgccaaccccaacgucgaccccaacgccaaccccaacgccaaccccaacgccaaccccaacgccaaccccaacgccaaccccaacgccaaccccaacgccaaccccaacgccaaccccaacgccaaccccaacgccaaccccaacgccaaccccaacgccaaccccaacgccaaccccaacgccaaccccaacgccaaccccaacgccaaccccaacgccaaccccaacgccaacccccccgucaccaacauggagaacaucaccuccggcuuccucggcccccuccucguccuccaggccggcuucuuccuccucacccgcauccucaccaucccccagucccucgacuccugguggaccucccucaacuuccucggcggcucccccgucugccucggccagaacucccagucccccaccuccaaccacucccccaccuccugcccccccaucugccccggcuaccgcuggaugugccuccgccgcuucaucaucuuccucuucauccuccuccucugccucaucuuccuccucguccuccucgacuaccagggcaugcuccccgucugcccccucauccccggcuccaccaccaccaacaccggccccugcaagaccugcaccacccccgcccagggcaacuccauguuccccuccugcugcugcaccaagcccaccgacggcaacugcaccugcauccccauccccuccuccugggccuucgccaaguaccucugggagugggccuccguccgcuucuccuggcucucccuccucguccccuucguccagugguucgucggccucucccccaccgucuggcucuccgccaucuggaugaugugguacuggggccccucccucuacuccaucgucucccccuucaucccccuccuccccaucuucuucugccucugggucuacaucugaggacuagucccuguucccagagcccacuuuuuuuucuuuuuuugaaauaaaauagccugucuuucagaucucaaaggcucuuuucagagccaccaaaaaaaaaaaaaaaaaaaaaaaaaaaaaaaaaaaaaaaaaaaaaaaaaaaaaaaaaaaaaaaaaaaaaaaaaaaaaaaaaaaaaaaaaaaaaaaaaaaaagaauu

SEQ ID NO: 9500 - RNA, 1903 nt, Artificial Sequence
  mRNA Design a-1 (hSL-A100-N5) comprising derived and/or modified sequence from Pf(3D7)__XP_001351122.1__HsALB_Pf-CSP(19-272)_L(AAY)_Pf-CSP(346-3 65)_L(AAY)_PADRE_L(PVTN)_HBsAg (opt2)
aggagagucccgcagucggcguccagcggcucugcuuguucgugugugugucguugcaggccuuauucaagcuuaccaugaagugggucaccuucaucucccuccucuuccucuucuccuccgccuacucccucuuccaggaguaccagugcuacggcuccuccuccaacacccgcguccucaacgagcucaacuacgacaacgccggcaccaaccucuacaacgagcucgagaugaacuacuacggcaagcaggagaacugguacucccucaagaagaacucccgcucccucggcgagaacgacgacggcaacaacgaggacaacgagaagcuccgcaagcccaagcacaagaagcucaagcagcccgccgacggcaaccccgaccccaacgccaaccccaacgucgaccccaacgccaaccccaacgucgaccccaacgccaaccccaacgucgaccccaacgccaaccccaacgccaaccccaacgccaaccccaacgccaaccccaacgccaaccccaacgccaaccccaacgccaaccccaacgccaaccccaacgccaaccccaacgccaaccccaacgccaaccccaacgccaaccccaacgccaaccccaacgccaaccccaacgccaaccccaacgccaaccccaacgccaaccccaacgucgaccccaacgccaaccccaacgccaaccccaacgccaaccccaacgccaaccccaacgccaaccccaacgccaaccccaacgccaaccccaacgccaaccccaacgccaaccccaacgccaaccccaacgccaaccccaacgccaaccccaacgccaaccccaacgccaaccccaacgccaaccccaacgccaaccccaacgccaaccccaacgccaaccccgccgccuacaucaagcccggcuccgccaacaagcccaaggacgagcucgacuacgccaacgacaucgaggccgccuacgccaaguucgucgccgccuggacccucaaggccgccgcccccgucaccaacauggagaacaucaccuccggcuuccucggcccccuccucguccuccaggccggcuucuuccuccucacccgcauccucaccaucccccagucccucgacuccugguggaccucccucaacuuccucggcggcucccccgucugccucggccagaacucccagucccccaccuccaaccacucccccaccuccugcccccccaucugccccggcuaccgcuggaugugccuccgccgcuucaucaucuuccucuucauccuccuccucugccucaucuuccuccucguccuccucgacuaccagggcaugcuccccgucugcccccucauccccggcuccaccaccaccaacaccggccccugcaagaccugcaccacccccgcccagggcaacuccauguuccccuccugcugcugcaccaagcccaccgacggcaacugcaccugcauccccauccccuccuccugggccuucgccaaguaccucugggagugggccuccguccgcuucuccuggcucucccuccucguccccuucguccagugguucgucggccucucccccaccgucuggcucuccgccaucuggaugaugugguacuggggccccucccucuacuccaucgucucccccuucaucccccuccuccccaucuucuucugccucugggucuacaucugaggacuagucccuguucccagagcccacuuuuuuuucuuuuuuugaaauaaaauagccugucuuucagaucucaaaggcucuuuucagagccaccaaaaaaaaaaaaaaaaaaaaaaaaaaaaaaaaaaaaaaaaaaaaaaaaaaaaaaaaaaaaaaaaaaaaaaaaaaaaaaaaaaaaaaaaaaaaaaaaaaaaagaauu

SEQ ID NO: 9501 - RNA, 2122 nt, Artificial Sequence
  mRNA Design a-1 (hSL-A100-N5) comprising derived and/or modified sequence from Pf(3D7)__XP_001351122.1__HsALB_Pf-CSP(19-384)_L(PVTN)_HBsAg (opt2)
aggagagucccgcagucggcguccagcggcucugcuuguucgugugugugucguugcaggccuuauucaagcuuaccaugaagugggucaccuucaucucccuccucuuccucuucuccuccgccuacucccucuuccaggaguaccagugcuacggcuccuccuccaacacccgcguccucaacgagcucaacuacgacaacgccggcaccaaccucuacaacgagcucgagaugaacuacuacggcaagcaggagaacugguacucccucaagaagaacucccgcucccucggcgagaacgacgacggcaacaacgaggacaacgagaagcuccgcaagcccaagcacaagaagcucaagcagcccgccgacggcaaccccgaccccaacgccaaccccaacgucgaccccaacgccaaccccaacgucgaccccaacgccaaccccaacgucgaccccaacgccaaccccaacgccaaccccaacgccaaccccaacgccaaccccaacgccaaccccaacgccaaccccaacgccaaccccaacgccaaccccaacgccaaccccaacgccaaccccaacgccaaccccaacgccaaccccaacgccaaccccaacgccaaccccaacgccaaccccaacgccaaccccaacgccaaccccaacgucgaccccaacgccaaccccaacgccaaccccaacgccaaccccaacgccaaccccaacgccaaccccaacgccaaccccaacgccaaccccaacgccaaccccaacgccaaccccaacgccaaccccaacgccaaccccaacgccaaccccaacgccaaccccaacgccaaccccaacgccaaccccaacgccaaccccaacgccaaccccaacgccaaccccaacaagaacaaccagggcaacggccagggccacaacaugcccaacgaccccaaccgcaacgucgacgagaacgccaacgccaacuccgccgucaagaacaacaacaacgaggagcccuccgacaagcacaucaaggaguaccucaacaagauccagaacucccucuccaccgaguggucccccugcuccgucaccugcggcaacggcauccagguccgcaucaagcccggcuccgccaacaagcccaaggacgagcucgacuacgccaacgacaucgagaagaagaucugcaagauggagaagugcuccuccgucuucaacgucgucaacuccucccccgucaccaacauggagaacaucaccuccggcuuccucggcccccuccucguccuccaggccggcuucuuccuccucacccgcauccucaccaucccccagucccucgacuccugguggaccucccucaacuuccucggcggcucccccgucugccucggccagaacucccagucccccaccuccaaccacucccccaccuccugcccccccaucugccccggcuaccgcuggaugugccuccgccgcuucaucaucuuccucuucauccuccuccucugccucaucuuccuccucguccuccucgacuaccagggcaugcuccccgucugcccccucauccccggcuccaccaccaccaacaccggccccugcaagaccugcaccacccccgcccagggcaacuccauguuccccuccugcugcugcaccaagcccaccgacggcaacugcaccugcauccccauccccuccuccugggccuucgccaaguaccucugggagugggccuccguccgcuucuccuggcucucccuccucguccccuucguccagugguucgucggccucucccccaccgucuggcucuccgccaucuggaugaugugguacuggggccccucccucuacuccaucgucucccccuucaucccccuccuccccaucuucuucugccucugggucuacaucugaggacuagucccuguucccagagcccacuuuuuuuucuuuuuuugaaauaaaauagccugucuuucagaucucaaaggcucuuuucagagccaccaaaaaaaaaaaaaaaaaaaaaaaaaaaaaaaaaaaaaaaaaaaaaaaaaaaaaaaaaaaaaaaaaaaaaaaaaaaaaaaaaaaaaaaaaaaaaaaaaaaaagaauu

SEQ ID NO: 9502 - RNA, 1939 nt, Artificial Sequence
  mRNA Design a-1 (hSL-A100-N5) comprising derived and/or modified sequence from Pf(3D7)__XP_001351122.1__HsALB_Pf-CSP(19-384)_L(SGG)_Ferritin (opt2)
aggagagucccgcagucggcguccagcggcucugcuuguucgugugugugucguugcaggccuuauucaagcuuaccaugaagugggucaccuucaucucccuccucuuccucuucuccuccgccuacucccucuuccaggaguaccagugcuacggcuccuccuccaacacccgcguccucaacgagcucaacuacgacaacgccggcaccaaccucuacaacgagcucgagaugaacuacuacggcaagcaggagaacugguacucccucaagaagaacucccgcucccucggcgagaacgacgacggcaacaacgaggacaacgagaagcuccgcaagcccaagcacaagaagcucaagcagcccgccgacggcaaccccgaccccaacgccaaccccaacgucgaccccaacgccaaccccaacgucgaccccaacgccaaccccaacgucgaccccaacgccaaccccaacgccaaccccaacgccaaccccaacgccaaccccaacgccaaccccaacgccaaccccaacgccaaccccaacgccaaccccaacgccaaccccaacgccaaccccaacgccaaccccaacgccaaccccaacgccaaccccaacgccaaccccaacgccaaccccaacgccaaccccaacgccaaccccaacgucgaccccaacgccaaccccaacgccaaccccaacgccaaccccaacgccaaccccaacgccaaccccaacgccaaccccaacgccaaccccaacgccaaccccaacgccaaccccaacgccaaccccaacgccaaccccaacgccaaccccaacgccaaccccaacgccaaccccaacgccaaccccaacgccaaccccaacgccaaccccaacgccaaccccaacaagaacaaccagggcaacggccagggccacaacaugcccaacgaccccaaccgcaacgucgacgagaacgccaacgccaacuccgccgucaagaacaacaacaacgaggagcccuccgacaagcacaucaaggaguaccucaacaagauccagaacucccucuccaccgaguggucccccugcuccgucaccugcggcaacggcauccagguccgcaucaagcccggcuccgccaacaagcccaaggacgagcucgacuacgccaacgacaucgagaagaagaucugcaagauggagaagugcuccuccgucuucaacgucgucaacuccuccuccggcggccucuccaaggacaucaucaagcuccucaacgagcaggucaacaaggagaugaacuccuccaaccucuacauguccauguccuccuggugcuacacccacucccucgacggcgccggccucuuccucuucgaccacgccgccgaggaguacgagcacgccaagaagcucaucaucuuccucaacgagaacaacguccccguccagcucaccuccaucuccgcccccgagcacaaguucgagggccucacccagaucuuccagaaggccuacgagcacgagcagcacaucuccgaguccaucaacaacaucgucgaccacgccaucaaguccaaggaccacgccaccuucaacuuccuccagugguacgucgccgagcagcacgaggaggagguccucuucaaggacauccucgacaagaucgagcucaucggcaacgagaaccacggccucuaccucgccgaccaguacgucaagggcaucgccaagucccgcaaguccugaggacuagucccuguucccagagcccacuuuuuuuucuuuuuuugaaauaaaauagccugucuuucagaucucaaaggcucuuuucagagccaccaaaaaaaaaaaaaaaaaaaaaaaaaaaaaaaaaaaaaaaaaaaaaaaaaaaaaaaaaaaaaaaaaaaaaaaaaaaaaaaaaaaaaaaaaaaaaaaaaaaaagaauu

SEQ ID NO: 9503 - RNA, 1900 nt, Artificial Sequence
  mRNA Design a-1 (hSL-A100-N5) comprising derived and/or modified sequence from Pf(3D7)__XP_001351122.1__HsALB_Pf-CSP(93-384)_L(PVTN)_HBsAg (opt2)
aggagagucccgcagucggcguccagcggcucugcuuguucgugugugugucguugcaggccuuauucaagcuuaccaugaagugggucaccuucaucucccuccucuuccucuucuccuccgccuacuccaagcucaagcagcccgccgacggcaaccccgaccccaacgccaaccccaacgucgaccccaacgccaaccccaacgucgaccccaacgccaaccccaacgucgaccccaacgccaaccccaacgccaaccccaacgccaaccccaacgccaaccccaacgccaaccccaacgccaaccccaacgccaaccccaacgccaaccccaacgccaaccccaacgccaaccccaacgccaaccccaacgccaaccccaacgccaaccccaacgccaaccccaacgccaaccccaacgccaaccccaacgccaaccccaacgucgaccccaacgccaaccccaacgccaaccccaacgccaaccccaacgccaaccccaacgccaaccccaacgccaaccccaacgccaaccccaacgccaaccccaacgccaaccccaacgccaaccccaacgccaaccccaacgccaaccccaacgccaaccccaacgccaaccccaacgccaaccccaacgccaaccccaacgccaaccccaacgccaaccccaacaagaacaaccagggcaacggccagggccacaacaugcccaacgaccccaaccgcaacgucgacgagaacgccaacgccaacuccgccgucaagaacaacaacaacgaggagcccuccgacaagcacaucaaggaguaccucaacaagauccagaacucccucuccaccgaguggucccccugcuccgucaccugcggcaacggcauccagguccgcaucaagcccggcuccgccaacaagcccaaggacgagcucgacuacgccaacgacaucgagaagaagaucugcaagauggagaagugcuccuccgucuucaacgucgucaacuccucccccgucaccaacauggagaacaucaccuccggcuuccucggcccccuccucguccuccaggccggcuucuuccuccucacccgcauccucaccaucccccagucccucgacuccugguggaccucccucaacuuccucggcggcucccccgucugccucggccagaacucccagucccccaccuccaaccacucccccaccuccugcccccccaucugccccggcuaccgcuggaugugccuccgccgcuucaucaucuuccucuucauccuccuccucugccucaucuuccuccucguccuccucgacuaccagggcaugcuccccgucugcccccucauccccggcuccaccaccaccaacaccggccccugcaagaccugcaccacccccgcccagggcaacuccauguuccccuccugcugcugcaccaagcccaccgacggcaacugcaccugcauccccauccccuccuccugggccuucgccaaguaccucugggagugggccuccguccgcuucuccuggcucucccuccucguccccuucguccagugguucgucggccucucccccaccgucuggcucuccgccaucuggaugaugugguacuggggccccucccucuacuccaucgucucccccuucaucccccuccuccccaucuucuucugccucugggucuacaucugaggacuagucccuguucccagagcccacuuuuuuuucuuuuuuugaaauaaaauagccugucuuucagaucucaaaggcucuuuucagagccaccaaaaaaaaaaaaaaaaaaaaaaaaaaaaaaaaaaaaaaaaaaaaaaaaaaaaaaaaaaaaaaaaaaaaaaaaaaaaaaaaaaaaaaaaaaaaaaaaaaaaagaauu

SEQ ID NO: 9504 - RNA, 1561 nt, Artificial Sequence; identical to SEQ ID NO: 7376
  mRNA Design a-1 (hSL-A100-N5) comprising derived and/or modified sequence from Pf(3D7)__XP_001351122.1__HsALB_Pf-CSP(199-377)_L(PVTN)_HBsAg (opt2)

SEQ ID NO: 9505 - RNA, 1258 nt, Artificial Sequence
  mRNA Design a-1 (hSL-A100-N5) comprising derived and/or modified sequence from Pf(3D7)__XP_001351122.1__HsALB_Pf-CSP(19-272)_L(AAY)_Pf-CSP(346-3 75)_L(AAY)_Pf-CSP(310-327) (opt2)
aggagagucccgcagucggcguccagcggcucugcuuguucgugugugugucguugcaggccuuauucaagcuuaccaugaagugggucaccuucaucucccuccucuuccucuucuccuccgccuacucccucuuccaggaguaccagugcuacggcuccuccuccaacacccgcguccucaacgagcucaacuacgacaacgccggcaccaaccucuacaacgagcucgagaugaacuacuacggcaagcaggagaacugguacucccucaagaagaacucccgcucccucggcgagaacgacgacggcaacaacgaggacaacgagaagcuccgcaagcccaagcacaagaagcucaagcagcccgccgacggcaaccccgaccccaacgccaaccccaacgucgaccccaacgccaaccccaacgucgaccccaacgccaaccccaacgucgaccccaacgccaaccccaacgccaaccccaacgccaaccccaacgccaaccccaacgccaaccccaacgccaaccccaacgccaaccccaacgccaaccccaacgccaaccccaacgccaaccccaacgccaaccccaacgccaaccccaacgccaaccccaacgccaaccccaacgccaaccccaacgccaaccccaacgccaaccccaacgucgaccccaacgccaaccccaacgccaaccccaacgccaaccccaacgccaaccccaacgccaaccccaacgccaaccccaacgccaaccccaacgccaaccccaacgccaaccccaacgccaaccccaacgccaaccccaacgccaaccccaacgccaaccccaacgccaaccccaacgccaaccccaacgccaaccccaacgccaaccccaacgccaaccccgccgccuacaucaagcccggcuccgccaacaagcccaaggacgagcucgacuacgccaacgacaucgagaagaagaucugcaagauggagaagugcuccgccgccuacgagcccuccgacaagcacaucaaggaguaccucaacaagauccagaacucccucugaggacuagucccuguucccagagcccacuuuuuuuucuuuuuuugaaauaaaauagccugucuuucagaucucaaaggcucuuuucagagccaccaaaaaaaaaaaaaaaaaaaaaaaaaaaaaaaaaaaaaaaaaaaaaaaaaaaaaaaaaaaaaaaaaaaaaaaaaaaaaaaaaaaaaaaaaaaaaaaaaaaaagaauu

SEQ ID NO: 9506 - RNA, 1306 nt, Artificial Sequence
  mRNA Design a-1 (hSL-A100-N5) comprising derived and/or modified sequence from Pf(3D7)__XP_001351122.1__HsALB_Pf-CSP(19-272)_L(AAY)_Pf-CSP(346-3 75)_L(AAY)_Pf-CSP(310-327)_L(AAY)_PADRE (opt2)
aggagagucccgcagucggcguccagcggcucugcuuguucgugugugugucguugcaggccuuauucaagcuuaccaugaagugggucaccuucaucucccuccucuuccucuucuccuccgccuacucccucuuccaggaguaccagugcuacggcuccuccuccaacacccgcguccucaacgagcucaacuacgacaacgccggcaccaaccucuacaacgagcucgagaugaacuacuacggcaagcaggagaacugguacucccucaagaagaacucccgcucccucggcgagaacgacgacggcaacaacgaggacaacgagaagcuccgcaagcccaagcacaagaagcucaagcagcccgccgacggcaaccccgaccccaacgccaaccccaacgucgaccccaacgccaaccccaacgucgaccccaacgccaaccccaacgucgaccccaacgccaaccccaacgccaaccccaacgccaaccccaacgccaaccccaacgccaaccccaacgccaaccccaacgccaaccccaacgccaaccccaacgccaaccccaacgccaaccccaacgccaaccccaacgccaaccccaacgccaaccccaacgccaaccccaacgccaaccccaacgccaaccccaacgccaaccccaacgucgaccccaacgccaaccccaacgccaaccccaacgccaaccccaacgccaaccccaacgccaaccccaacgccaaccccaacgccaaccccaacgccaaccccaacgccaaccccaacgccaaccccaacgccaaccccaacgccaaccccaacgccaaccccaacgccaaccccaacgccaaccccaacgccaaccccaacgccaaccccaacgccaaccccgccgccuacaucaagcccggcuccgccaacaagcccaaggacgagcucgacuacgccaacgacaucgagaagaagaucugcaagauggagaagugcuccgccgccuacgagcccuccgacaagcacaucaaggaguaccucaacaagauccagaacucccucgccgccuacgccaaguucgucgccgccuggacccucaaggccgccgccugaggacuagucccuguucccagagcccacuuuuuuuucuuuuuuugaaauaaaauagccugucuuucagaucucaaaggcucuuuucagagccaccaaaaaaaaaaaaaaaaaaaaaaaaaaaaaaaaaaaaaaaaaaaaaaaaaaaaaaaaaaaaaaaaaaaaaaaaaaaaaaaaaaaaaaaaaaaaaaaaaaaaagaauu

SEQ ID NO: 9507 - RNA, 1306 nt, Artificial Sequence
  mRNA Design a-1 (hSL-A100-N5) comprising derived and/or modified sequence from Pf(3D7)__XP_001351122.1__HsALB_Pf-CSP(19-272)_L(AAY)_Pf-CSP(310-3 27)_L(AAY)_Pf-CSP(346-375)_L(AAY)_PADRE (opt2)
aggagagucccgcagucggcguccagcggcucugcuuguucgugugugugucguugcaggccuuauucaagcuuaccaugaagugggucaccuucaucucccuccucuuccucuucuccuccgccuacucccucuuccaggaguaccagugcuacggcuccuccuccaacacccgcguccucaacgagcucaacuacgacaacgccggcaccaaccucuacaacgagcucgagaugaacuacuacggcaagcaggagaacugguacucccucaagaagaacucccgcucccucggcgagaacgacgacggcaacaacgaggacaacgagaagcuccgcaagcccaagcacaagaagcucaagcagcccgccgacggcaaccccgaccccaacgccaaccccaacgucgaccccaacgccaaccccaacgucgaccccaacgccaaccccaacgucgaccccaacgccaaccccaacgccaaccccaacgccaaccccaacgccaaccccaacgccaaccccaacgccaaccccaacgccaaccccaacgccaaccccaacgccaaccccaacgccaaccccaacgccaaccccaacgccaaccccaacgccaaccccaacgccaaccccaacgccaaccccaacgccaaccccaacgccaaccccaacgucgaccccaacgccaaccccaacgccaaccccaacgccaaccccaacgccaaccccaacgccaaccccaacgccaaccccaacgccaaccccaacgccaaccccaacgccaaccccaacgccaaccccaacgccaaccccaacgccaaccccaacgccaaccccaacgccaaccccaacgccaaccccaacgccaaccccaacgccaaccccaacgccaaccccgccgccuacgagcccuccgacaagcacaucaaggaguaccucaacaagauccagaacucccucgccgccuacaucaagcccggcuccgccaacaagcccaaggacgagcucgacuacgccaacgacaucgagaagaagaucugcaagauggagaagugcuccgccgccuacgccaaguucgucgccgccuggacccucaaggccgccgccugaggacuagucccuguucccagagcccacuuuuuuuucuuuuuuugaaauaaaauagccugucuuucagaucucaaaggcucuuuucagagccaccaaaaaaaaaaaaaaaaaaaaaaaaaaaaaaaaaaaaaaaaaaaaaaaaaaaaaaaaaaaaaaaaaaaaaaaaaaaaaaaaaaaaaaaaaaaaaaaaaaaaagaauu

SEQ ID NO: 9508 - RNA, 1360 nt, Artificial Sequence
  mRNA Design a-1 (hSL-A100-N5) comprising derived and/or modified sequence from Pf(3D7)__XP_001351122.1__HsALB_Pf-CSP(19-272)_L(AAY)_Pf-CSP(310-3 27)_L(AAY)_Pf-CSP(346-375)_L(AAY)_PADRE_L(AAY)_P2 (opt2)
aggagagucccgcagucggcguccagcggcucugcuuguucgugugugugucguugcaggccuuauucaagcuuaccaugaagugggucaccuucaucucccuccucuuccucuucuccuccgccuacucccucuuccaggaguaccagugcuacggcuccuccuccaacacccgcguccucaacgagcucaacuacgacaacgccggcaccaaccucuacaacgagcucgagaugaacuacuacggcaagcaggagaacugguacucccucaagaagaacucccgcucccucggcgagaacgacgacggcaacaacgaggacaacgagaagcuccgcaagcccaagcacaagaagcucaagcagcccgccgacggcaaccccgaccccaacgccaaccccaacgucgaccccaacgccaaccccaacgucgaccccaacgccaaccccaacgucgaccccaacgccaaccccaacgccaaccccaacgccaaccccaacgccaaccccaacgccaaccccaacgccaaccccaacgccaaccccaacgccaaccccaacgccaaccccaacgccaaccccaacgccaaccccaacgccaaccccaacgccaaccccaacgccaaccccaacgccaaccccaacgccaaccccaacgccaaccccaacgucgaccccaacgccaaccccaacgccaaccccaacgccaaccccaacgccaaccccaacgccaaccccaacgccaaccccaacgccaaccccaacgccaaccccaacgccaaccccaacgccaaccccaacgccaaccccaacgccaaccccaacgccaaccccaacgccaaccccaacgccaaccccaacgccaaccccaacgccaaccccaacgccaaccccgccgccuacgagcccuccgacaagcacaucaaggaguaccucaacaagauccagaacucccucgccgccuacaucaagcccggcuccgccaacaagcccaaggacgagcucgacuacgccaacgacaucgagaagaagaucugcaagauggagaagugcuccgccgccuacgccaaguucgucgccgccuggacccucaaggccgccgccgccgccuaccaguacaucaaggccaacuccaaguucaucggcaucaccgagcucugaggacuagucccuguucccagagcccacuuuuuuuucuuuuuuugaaauaaaauagccugucuuucagaucucaaaggcucuuuucagagccaccaaaaaaaaaaaaaaaaaaaaaaaaaaaaaaaaaaaaaaaaaaaaaaaaaaaaaaaaaaaaaaaaaaaaaaaaaaaaaaaaaaaaaaaaaaaaaaaaaaaaagaauu

SEQ ID NO: 9509 - RNA, 1324 nt, Artificial Sequence
  mRNA Design a-1 (hSL-A100-N5) comprising derived and/or modified sequence from Pf(3D7)__XP_001351122.1__HsALB_Pf-CSP(19-272)_L(AAY)_Pf-CSP(310-3 27)_Linker (AAY)_Pf-CSP(346-397) (opt2)
aggagagucccgcagucggcguccagcggcucugcuuguucgugugugugucguugcaggccuuauucaagcuuaccaugaagugggucaccuucaucucccuccucuuccucuucuccuccgccuacucccucuuccaggaguaccagugcuacggcuccuccuccaacacccgcguccucaacgagcucaacuacgacaacgccggcaccaaccucuacaacgagcucgagaugaacuacuacggcaagcaggagaacugguacucccucaagaagaacucccgcucccucggcgagaacgacgacggcaacaacgaggacaacgagaagcuccgcaagcccaagcacaagaagcucaagcagcccgccgacggcaaccccgaccccaacgccaaccccaacgucgaccccaacgccaaccccaacgucgaccccaacgccaaccccaacgucgaccccaacgccaaccccaacgccaaccccaacgccaaccccaacgccaaccccaacgccaaccccaacgccaaccccaacgccaaccccaacgccaaccccaacgccaaccccaacgccaaccccaacgccaaccccaacgccaaccccaacgccaaccccaacgccaaccccaacgccaaccccaacgccaaccccaacgccaaccccaacgucgaccccaacgccaaccccaacgccaaccccaacgccaaccccaacgccaaccccaacgccaaccccaacgccaaccccaacgccaaccccaacgccaaccccaacgccaaccccaacgccaaccccaacgccaaccccaacgccaaccccaacgccaaccccaacgccaaccccaacgccaaccccaacgccaaccccaacgccaaccccaacgccaaccccgccgccuacgagcccuccgacaagcacaucaaggaguaccucaacaagauccagaacucccucgccgccuacaucaagcccggcuccgccaacaagcccaaggacgagcucgacuacgccaacgacaucgagaagaagaucugcaagauggagaagugcuccuccgucuucaacgucgucaacuccuccaucggccucaucaugguccucuccuuccucuuccucaacugaggacuagucccuguucccagagcccacuuuuuuuucuuuuuuugaaauaaaauagccugucuuucagaucucaaaggcucuuuucagagccaccaaaaaaaaaaaaaaaaaaaaaaaaaaaaaaaaaaaaaaaaaaaaaaaaaaaaaaaaaaaaaaaaaaaaaaaaaaaaaaaaaaaaaaaaaaaaaaaaaaaaagaauu

SEQ ID NO: 9510 - RNA, 1924 nt, Artificial Sequence
  mRNA Design a-1 (hSL-A100-N5) comprising derived and/or modified sequence from Pf(3D7)__XP_001351122.1__LumSynt_L(GGS4-GGG)_Pf-CSP(19-397) (opt3)
aggagagucccgcagucggcguccagcggcucugcuuguucgugugugugucguugcaggccuuauucaagcuuaccaugcagaucuacgagggcaagcugaccgccgaagggcucagauucggaauuguggcuagcagguuuaaccacgcacuugucgaccggcugguugagggugccauagaugcgaucgugcgccauggcgggcgagaagaggacauuacauugguacgugugcccggauccugggaaaucccugucgcugccggcgaguuagcaagaaaagaggauauugacgccgugaucgcuauagguguucugaucaggggagcaacuccacacuucgauuauauugccucugaagugucaaaggggcuagcugaccucagucuggagcuucggaaaccgaucacguuuggcgucauuaccgccgauacacuggaacaagcgaucgagcgcgcaggcacuaagcaugggaauaaaggaugggaggccgcuuugagcgccauagaaauggcaaaccucuucaagucccugagagguggcucugggggaucgggcgguucagggggaagcggcggcgggcuguuucaggaguaccagugcuauggaaguuccucuaauaccagggugcucaacgaauuaaauuacgacaacgcugguacaaaucuguauaacgagcuugaaaugaauuacuauggcaagcaggagaacugguacagcuugaaaaagaacucccggucacugggggagaaugaugacggaaauaacgaagauaaugagaaacuacgcaagcccaaacacaagaagcucaaacaaccugccgacggcaacccagaucccaacgcgaauccuaacguagacccaaaugccaaccccaauguugacccuaacgcaaauccaaacguggauccgaaugcuaaccccaaugccaacccuaaugcuaacccaaaugccaaccccaacgcaaauccuaacgccaauccaaacgcuaaucccaacgcgaauccgaacgcaaauccuaacgccaaucccaacgcuaauccaaacgccaauccuaacgcaaaccccaaugccaacccaaaugcuaaccccaaugccaacccuaaugcaaacccaaaugucgacccgaacgcgaaucccaacgcuaauccuaacgccaauccaaacgcaaaccccaaugccaacccuaaugcuaacccaaaugccaaccccaaugcaaacccgaaugcuaacccuaaugccaacccaaaugcgaaccccaaugccaacccuaaugcuaaccccaacgcaaauccaaacgccaauccuaacgcuaaucccaacgccaauccaaacgcaaauccgaacaagaauaaccaggguaaugggcagggccauaacaugccuaaugaucccaaccgaaacguggacgaaaaugcgaacgccaauagugcugugaaaaacaauaacaaugaggaaccaagcgauaagcacauuaaagaguaccugaacaagauccaaaauucucuuuccaccgaguggucacccugcagcgucacuugcggaaacggcauucagguuagaaucaaaccugggagugccaauaagccaaaggacgaacuggauuaugcaaacgacaucgagaaaaagauuuguaaaauggaaaaguguucuuccguguucaauguagugaacagcucgauaggauugaucaugguccucucuuuucuguucuuaaauugaggacuagucccuguucccagagcccacuuuuuuuucuuuuuuugaaauaaaauagccugucuuucagaucucaaaggcucuuuucagagccaccaaaaaaaaaaaaaaaaaaaaaaaaaaaaaaaaaaaaaaaaaaaaaaaaaaaaaaaaaaaaaaaaaaaaaaaaaaaaaaaaaaaaaaaaaaaaaaaaaaaaagaauu

SEQ ID NO: 9511 - RNA, 1786 nt, Artificial Sequence
  mRNA Design a-1 (hSL-A100-N5) comprising derived and/or modified sequence from Pf(3D7)__XP_001351122.1__HsALB_Pf-CSP(19-272)_L(PVTN)_HBsAg (opt3)
aggagagucccgcagucggcguccagcggcucugcuuguucgugugugugucguugcaggccuuauucaagcuuaccaugaagugggugaccuucaucagccugcucuuucuuuucuccucugccuacucacuguuucaggaguaucaaugcuacggcaguagcuccaacacaagagucuugaaugaauuaaacuaugacaaugcugggacuaaccuguacaaugagcuagaaaugaacuauuacggaaaacaggagaauugguauucucucaagaaaaacucgaggucacugggugaaaaugaugacggcaacaaugaggauaacgagaaacuucggaagcccaagcacaagaaacugaagcagccugcagacgggaauccagauccgaacgccaaucccaacguugacccuaacgcgaauccaaacguggaucccaaugcuaacccuaauguagacccaaacgccaaucccaacgcaaauccuaacgccaauccaaacgcuaauccgaacgcaaaucccaacgccaacccuaaugcuaacccaaaugccaaccccaaugcgaacccuaaugcaaacccaaaugccaaccccaaugcuaacccgaaugccaacccuaaugcaaaccccaacgcuaauccaaacgccaauccuaacgcgaaucccaacguggauccaaaugccaaccccaaugcaaacccuaaugcuaacccaaaugccaacccgaaugcuaaccccaacgccaauccuaacgcaaauccaaacgccaaucccaacgcuaauccuaacgcgaauccaaacgcaaaucccaacgccaauccgaacgcuaauccuaacgccaauccaaacgcaaaccccaaugccaacccuaaugcuaaccccaaugccaacccaccugucacgaauauggaaaacauuaccagcggauucuugggcccccuccuggugcugcaggcaggguuuuuccucuuaacacgcauacugacuaucccacaaagucuugacuccugguggaccucuuugaauuuucuggguggaagcccgguuugucuaggccagaacucccagucaccuacaaguaaucauagccccaccucuugcccacccauuuguccuggcuaccgauggaugugccuccguagauucaucauuuuucuguucauccuucuguugugucucauauuucuguuagugcugcucgauuaccaggggaugcuuccagucugcccccugaucccuggauccacuacaaccaacacggguccguguaaaacuugcaccacaccagcgcaaggcaauucaauguuccccagcuguugcuguacuaagccuaccgacgggaacugcacaugcauuccaauccccaguucuugggcuuuugccaaauauuugugggagugggcauccgugagguucagcuggcuaucgcugcucguaccuuucguucagugguuugugggacugucuccgaccgucuggcuuuccgccauuuggaugaugugguacuggggccccucacuguauaguaucgugagcccauucauaccuuugcuccccaucuuuuucugucuguggguguacauuugaggacuagucccuguucccagagcccacuuuuuuuucuuuuuuugaaauaaaauagccugucuuucagaucucaaaggcucuuuucagagccaccaaaaaaaaaaaaaaaaaaaaaaaaaaaaaaaaaaaaaaaaaaaaaaaaaaaaaaaaaaaaaaaaaaaaaaaaaaaaaaaaaaaaaaaaaaaaaaaaaaaaagaauu

SEQ ID NO: 9512 - RNA, 1903 nt, Artificial Sequence
  mRNA Design a-1 (hSL-A100-N5) comprising derived and/or modified sequence from Pf(3D7)__XP_001351122.1__HsALB_Pf-CSP(19-272)_L(AAY)_Pf-CSP(346-3 65)_L(AAY)_PADRE_L(PVTN)_HBsAg (opt3)
aggagagucccgcagucggcguccagcggcucugcuuguucgugugugugucguugcaggccuuauucaagcuuaccaugaagugggugaccuucaucagccugcucuuucuuuucuccucugccuacucacuguuucaggaguaucaaugcuacggcaguagcuccaacacaagagucuugaaugaauuaaacuaugacaaugcugggacuaaccuguacaaugagcuagaaaugaacuauuacggaaaacaggagaauugguauucucucaagaaaaacucgaggucacugggugaaaaugaugacggcaacaaugaggauaacgagaaacuucggaagcccaagcacaagaaacugaagcagccugcagacgggaauccagauccgaacgccaaucccaacguugacccuaacgcgaauccaaacguggaucccaaugcuaacccuaauguagacccaaacgccaaucccaacgcaaauccuaacgccaauccaaacgcuaauccgaacgcaaaucccaacgccaacccuaaugcuaacccaaaugccaaccccaaugcgaacccuaaugcaaacccaaaugccaaccccaaugcuaacccgaaugccaacccuaaugcaaaccccaacgcuaauccaaacgccaauccuaacgcgaaucccaacguggauccaaaugccaaccccaaugcaaacccuaaugcuaacccaaaugccaacccgaaugcuaaccccaacgccaauccuaacgcaaauccaaacgccaaucccaacgcuaauccuaacgcgaauccaaacgcaaaucccaacgccaauccgaacgcuaauccuaacgccaauccaaacgcaaaccccaaugccaacccuaaugcuaaccccaaugccaacccagcagcguacauuaaaccuggaagcgcuaauaagcccaaagacgaauuggauuacgccaacgacauagaggcagccuaugcuaaguucgucgccgcauggacgcucaaggcugccgcgccagugaccaauauggaaaacaucacaaguggcuuucuggguccgcugcucguuuuacaggccggguucuuucugcuuacucgcauuuugaccaucccucaaucccuggauucuugguggacaagccuaaauuuccucggaggcucccccgugugucugggccagaacucacagaguccaaccagcaaucauucucccacuuccugcccuccaauuugucccggguaccgauggaugugccuucguagauuuaucauauuccuguuuaucuugcuccuguguuuaauuuuccugcucguccuucuggacuaucagggaauguugccugugugcccgcuaaucccagguucaacaaccacgaacacuggccccuguaaaaccugcacaacuccugcucaagggaauagcauguuuccaaguuguugcuguaccaagcccacagacggaaacuguaccugcauuccuaucccgucuuccugggcauucgccaaauaccugugggagugggcuagcguaagguucucguggcucucucugcuuguucccuuugugcagugguucgucggccuguccccaacggugugguugucagccauauggaugaugugguauugggguccuagucucuacagcauugugucccccuuuaucccacuguuaccuauuuucuuuugccugugggucuauaucugaggacuagucccuguucccagagcccacuuuuuuuucuuuuuuugaaauaaaauagccugucuuucagaucucaaaggcucuuuucagagccaccaaaaaaaaaaaaaaaaaaaaaaaaaaaaaaaaaaaaaaaaaaaaaaaaaaaaaaaaaaaaaaaaaaaaaaaaaaaaaaaaaaaaaaaaaaaaaaaaaaaaagaauu

SEQ ID NO: 9513 - RNA, 2122 nt, Artificial Sequence
  mRNA Design a-1 (hSL-A100-N5) comprising derived and/or modified sequence from Pf(3D7)__XP_001351122.1__HsALB_Pf-CSP(19-384)_L(PVTN)_HBsAg (opt3)
aggagagucccgcagucggcguccagcggcucugcuuguucgugugugugucguugcaggccuuauucaagcuuaccaugaagugggugaccuucaucagccugcucuuucuuuucuccucugccuacucacuguuucaggaguaucaaugcuacggcaguagcuccaacacaagagucuugaaugaauuaaacuaugacaaugcugggacuaaccuguacaaugagcuagaaaugaacuauuacggaaaacaggagaauugguauucucucaagaaaaacucgaggucacugggugaaaaugaugacggcaacaaugaggauaacgagaaacuucggaagcccaagcacaagaaacugaagcagccugcagacgggaauccagauccgaacgccaaucccaacguugacccuaacgcgaauccaaacguggaucccaaugcuaacccuaauguagacccaaacgccaaucccaacgcaaauccuaacgccaauccaaacgcuaauccgaacgcaaaucccaacgccaacccuaaugcuaacccaaaugccaaccccaaugcgaacccuaaugcaaacccaaaugccaaccccaaugcuaacccgaaugccaacccuaaugcaaaccccaacgcuaauccaaacgccaauccuaacgcgaaucccaacguggauccaaaugccaaccccaaugcaaacccuaaugcuaacccaaaugccaacccgaaugcuaaccccaacgccaauccuaacgcaaauccaaacgccaaucccaacgcuaauccuaacgcgaauccaaacgcaaaucccaacgccaauccgaacgcuaauccuaacgccaauccaaacgcaaaccccaaugccaacccuaaugcuaaccccaaugccaacccaaauaaaaacaaucagggaaacggccaaggucauaauaugccuaacgaccccaaucgcaacgucgaugaaaaugcaaacgcgaacagcgcugugaagaauaacaauaacgaggaaccaagugacaaacacauuaaggaguacuugaauaagauacagaacucccucucuacggaguggagcccguguuccguuaccugcgggaauggaauccaggugcgaauuaaaccuggcucagccaacaagcccaaagaugaacuggacuacgcaaaugacaucgagaagaaaauuuguaagauggaaaaaugcaguagcgucuucaacgugguaaauucuuccccaguuacaaacauggagaauaucacuucaggcuuucuggggccccucuuagugcugcaggccggauucuuucuuuugacccguauacugacaaucccucaaagccuagauaguugguggaccucucucaacuuccuggguggcuccccagucugucuugggcagaauagccagucgcccacuucuaaccauuccccuacaucaugcccgccaauuugucccggauauagauggaugugccugaggcgguuuaucauuuucuuguuuauccuccuguuaugucugauauuccuccuugugcuguuggacuaccagggcaugcuaccugugugcccacugauucccgguaguaccacgacuaacaccgggccuuguaagacaugcacuaccccggcucaaggaaauagcauguuucccuccugcuguugcacaaagccaaccgauggcaacuguacgugcaucccuauucccucuagcugggccuucgcaaaauaucucugggaaugggcuucaguccgcuucaguuggcugucccuucugguuccauuugugcagugguucguaggcuugagcccuacuguguggcucucugccaucuggaugaugugguacugggggcccucacuguauaguaucgucagcccauuuauuccguuacugccuauauucuuuugucuauggguguacaucugaggacuagucccuguucccagagcccacuuuuuuuucuuuuuuugaaauaaaauagccugucuuucagaucucaaaggcucuuuucagagccaccaaaaaaaaaaaaaaaaaaaaaaaaaaaaaaaaaaaaaaaaaaaaaaaaaaaaaaaaaaaaaaaaaaaaaaaaaaaaaaaaaaaaaaaaaaaaaaaaaaaaagaauu

SEQ ID NO: 9514 - RNA, 1939 nt, Artificial Sequence
  mRNA Design a-1 (hSL-A100-N5) comprising derived and/or modified sequence from Pf(3D7)__XP_001351122.1__HsALB_Pf-CSP(19-384)_L(SGG)_Ferritin (opt3)
aggagagucccgcagucggcguccagcggcucugcuuguucgugugugugucguugcaggccuuauucaagcuuaccaugaagugggugaccuucaucagccugcucuuucuuuucuccucugccuacucacuguuucaggaguaucaaugcuacggcaguagcuccaacacaagagucuugaaugaauuaaacuaugacaaugcugggacuaaccuguacaaugagcuagaaaugaacuauuacggaaaacaggagaauugguauucucucaagaaaaacucgaggucacugggugaaaaugaugacggcaacaaugaggauaacgagaaacuucggaagcccaagcacaagaaacugaagcagccugcagacgggaauccagauccgaacgccaaucccaacguugacccuaacgcgaauccaaacguggaucccaaugcuaacccuaauguagacccaaacgccaaucccaacgcaaauccuaacgccaauccaaacgcuaauccgaacgcaaaucccaacgccaacccuaaugcuaacccaaaugccaaccccaaugcgaacccuaaugcaaacccaaaugccaaccccaaugcuaacccgaaugccaacccuaaugcaaaccccaacgcuaauccaaacgccaauccuaacgcgaaucccaacguggauccaaaugccaaccccaaugcaaacccuaaugcuaacccaaaugccaacccgaaugcuaaccccaacgccaauccuaacgcaaauccaaacgccaaucccaacgcuaauccuaacgcgaauccaaacgcaaaucccaacgccaauccgaacgcuaauccuaacgccaauccaaacgcaaaccccaaugccaacccuaaugcuaaccccaaugccaacccaaauaaaaacaaucagggaaacggccaaggucauaauaugccuaacgaccccaaucgcaacgucgaugaaaaugcaaacgcgaacagcgcugugaagaauaacaauaacgaggaaccaagugacaaacacauuaaggaguacuugaauaagauacagaacucccucucuacggaguggagcccguguuccguuaccugcgggaauggaauccaggugcgaauuaaaccuggcucagccaacaagcccaaagaugaacuggacuacgcaaaugacaucgagaagaaaauuuguaagauggaaaaaugcaguagcgucuucaacgugguaaauucuuccucaggcgggcugagcaaggauaucauaaagcucuuaaacgagcagguuaauaaagaaaugaacaguucuaaucuguauauguccaugagcucgugguguuacacacauucucuugacggagccgguuuguuucuguucgaucacgcugccgaggaguaugaacaugcaaagaaacuaaucauuuuucucaacgagaacaaugugccaguccaacugacuuccaucucagcucccgaacacaaguucgagggccuuacccagauuuuucagaaagccuacgaacacgagcagcauaucagugagagcauaaacaauauuguggaccacgcgaucaaguccaaggaucaugccacauucaacuuucugcaaugguauguggcugaacagcacgaggaagaggucuuguucaaagacauucucgauaagaucgaacugaucgggaaugagaaccacggauuauaccuggcagaccaguauguuaaaggcauugccaagucucguaaaagcugaggacuagucccuguucccagagcccacuuuuuuuucuuuuuuugaaauaaaauagccugucuuucagaucucaaaggcucuuuucagagccaccaaaaaaaaaaaaaaaaaaaaaaaaaaaaaaaaaaaaaaaaaaaaaaaaaaaaaaaaaaaaaaaaaaaaaaaaaaaaaaaaaaaaaaaaaaaaaaaaaaaaagaauu

SEQ ID NO: 9515 - RNA, 1900 nt, Artificial Sequence
  mRNA Design a-1 (hSL-A100-N5) comprising derived and/or modified sequence from Pf(3D7)__XP_001351122.1__HsALB_Pf-CSP(93-384)_L(PVTN)_HBsAg (opt3)
aggagagucccgcagucggcguccagcggcucugcuuguucgugugugugucguugcaggccuuauucaagcuuaccaugaagugggugaccuucaucagccugcucuuucuuuucuccucugccuacucaaaacugaagcagcccgcugacggcaacccugauccaaaugcaaacccgaaugucgaccccaacgccaauccuaacguugauccaaaugcgaaccccaauguggacccuaacgcuaauccaaacgccaaucccaacgcaaauccuaacgccaacccaaaugcuaacccgaaugcaaaccccaaugccaacccuaaugcuaacccaaaugccaaccccaaugcgaacccuaaugcaaacccaaaugccaaccccaacgcuaauccgaacgccaauccuaacgcaaaucccaacgcuaauccaaacgccaauccuaacguagaucccaaugcgaacccaaaugccaaccccaaugcaaacccuaacgcuaauccaaacgccaauccgaacgcuaaucccaacgccaauccuaacgcaaauccaaacgccaaucccaacgcuaauccuaacgcgaauccaaacgcaaaccccaaugccaacccgaaugcuaacccuaaugccaacccaaaugcaaaccccaaugccaacccuaaugcuaaccccaauaaaaacaaucaagggaacggacagggucacaauaugccaaacgacccuaacagaaauguggaugagaacgccaaugcaaacagugcggucaagaauaacaauaacgaggaacccagcgacaaacauauuaaggaauauuugaauaagauacagaacuccuuaucuacagaguggucgccaugcucagugacuuguggcaaugggauccagguuaggauuaaaccgggaagcgcuaacaagccuaaagaugaacuggacuacgccaaugauaucgagaagaaaauuugcaagauggagaaguguaguuccguguuuaacgucguaaauucuagccccgugacgaacauggaaaacaucaccuccggcuuccuagguccacuccugguucuucaagcaggguuuuuccuguugacacggauacucacuaucccccagucacuggacaguugguggaccagccugaauuuucucggaggcucuccugugugcuuaggccagaacucccagucaccaacaagcaaucacagucccaccucuuguccuccgauuugcccaggguaucgcuggaugugucugcgacguuucaucauuuuucuuuucaucuugcugcuaugccucauauuucugcuuguccuguuggauuaccaaggaaugcuccccguguguccucugauuccagguuccacuacaaccaacacgggccccugcaaaacuuguaccacuccugcccaggggaauagcauguucccgucgugcugcuguacaaagcccaccgacggaaacugcacauguaucccaauuccuucuuccugggcuuuugccaaauauuuaugggagugggcaucagugagauucaguuggcugagccuccuuguccccuucguucagugguuugugggccuguccccaaccguaugguugucugcuaucuggaugaugugguacugggguccuagccuauauucaaucgugagucccuucauuccacugcucccgauauuuuucugccugugggucuacaucugaggacuagucccuguucccagagcccacuuuuuuuucuuuuuuugaaauaaaauagccugucuuucagaucucaaaggcucuuuucagagccaccaaaaaaaaaaaaaaaaaaaaaaaaaaaaaaaaaaaaaaaaaaaaaaaaaaaaaaaaaaaaaaaaaaaaaaaaaaaaaaaaaaaaaaaaaaaaaaaaaaaaagaauu

SEQ ID NO: 9516 - RNA, 1561 nt, Artificial Sequence; identical to SEQ ID NO: 7406
  mRNA Design a-1 (hSL-A100-N5) comprising derived and/or modified sequence from Pf(3D7)__XP_001351122.1__HsALB_Pf-CSP(199-377)_L(PVTN)_HBsAg (opt3)

SEQ ID NO: 9517 - RNA, 1258 nt, Artificial Sequence
  mRNA Design a-1 (hSL-A100-N5) comprising derived and/or modified sequence from Pf(3D7)__XP_001351122.1__HsALB_Pf-CSP(19-272)_L(AAY)_Pf-CSP(346-3 75)_L(AAY)_Pf-CSP(310-327) (opt3)
aggagagucccgcagucggcguccagcggcucugcuuguucgugugugugucguugcaggccuuauucaagcuuaccaugaagugggugaccuucaucagccugcucuuucuuuucuccucugccuacucacuguuucaggaguaucaaugcuacggcaguagcuccaacacaagagucuugaaugaauuaaacuaugacaaugcugggacuaaccuguacaaugagcuagaaaugaacuauuacggaaaacaggagaauugguauucucucaagaaaaacucgaggucacugggugaaaaugaugacggcaacaaugaggauaacgagaaacuucggaagcccaagcacaagaaacugaagcagccugcagacgggaauccagauccgaacgccaaucccaacguugacccuaacgcgaauccaaacguggaucccaaugcuaacccuaauguagacccaaacgccaaucccaacgcaaauccuaacgccaauccaaacgcuaauccgaacgcaaaucccaacgccaacccuaaugcuaacccaaaugccaaccccaaugcgaacccuaaugcaaacccaaaugccaaccccaaugcuaacccgaaugccaacccuaaugcaaaccccaacgcuaauccaaacgccaauccuaacgcgaaucccaacguggauccaaaugccaaccccaaugcaaacccuaaugcuaacccaaaugccaacccgaaugcuaaccccaacgccaauccuaacgcaaauccaaacgccaaucccaacgcuaauccuaacgcgaauccaaacgcaaaucccaacgccaauccgaacgcuaauccuaacgccaauccaaacgcaaaccccaaugccaacccuaaugcuaaccccaaugccaacccagcagcguacauuaaaccuggaagcgcuaauaagcccaaagacgaauuggauuacgccaacgacauagagaagaagaucuguaaaauggaaaagugcagugcagccuaugagccauccgauaaacauauuaaggaguaccucaauaaaauccagaacucucugugaggacuagucccuguucccagagcccacuuuuuuuucuuuuuuugaaauaaaauagccugucuuucagaucucaaaggcucuuuucagagccaccaaaaaaaaaaaaaaaaaaaaaaaaaaaaaaaaaaaaaaaaaaaaaaaaaaaaaaaaaaaaaaaaaaaaaaaaaaaaaaaaaaaaaaaaaaaaaaaaaaaaagaauu

SEQ ID NO: 9518 - RNA, 1306 nt, Artificial Sequence
  mRNA Design a-1 (hSL-A100-N5) comprising derived and/or modified sequence from Pf(3D7)__XP_001351122.1__HsALB_Pf-CSP(19-272)_L(AAY)_Pf-CSP(346-3 75)_L(AAY)_Pf-CSP(310-327)_L(AAY)_PADRE (opt3)
aggagagucccgcagucggcguccagcggcucugcuuguucgugugugugucguugcaggccuuauucaagcuuaccaugaagugggugaccuucaucagccugcucuuucuuuucuccucugccuacucacuguuucaggaguaucaaugcuacggcaguagcuccaacacaagagucuugaaugaauuaaacuaugacaaugcugggacuaaccuguacaaugagcuagaaaugaacuauuacggaaaacaggagaauugguauucucucaagaaaaacucgaggucacugggugaaaaugaugacggcaacaaugaggauaacgagaaacuucggaagcccaagcacaagaaacugaagcagccugcagacgggaauccagauccgaacgccaaucccaacguugacccuaacgcgaauccaaacguggaucccaaugcuaacccuaauguagacccaaacgccaaucccaacgcaaauccuaacgccaauccaaacgcuaauccgaacgcaaaucccaacgccaacccuaaugcuaacccaaaugccaaccccaaugcgaacccuaaugcaaacccaaaugccaaccccaaugcuaacccgaaugccaacccuaaugcaaaccccaacgcuaauccaaacgccaauccuaacgcgaaucccaacguggauccaaaugccaaccccaaugcaaacccuaaugcuaacccaaaugccaacccgaaugcuaaccccaacgccaauccuaacgcaaauccaaacgccaaucccaacgcuaauccuaacgcgaauccaaacgcaaaucccaacgccaauccgaacgcuaauccuaacgccaauccaaacgcaaaccccaaugccaacccuaaugcuaaccccaaugccaacccagcagcguacauuaaaccuggaagcgcuaauaagcccaaagacgaauuggauuacgccaacgacauagagaagaagaucuguaaaauggaaaagugcagugcagccuaugagccauccgauaaacauauuaaggaguaccucaauaaaauccagaacucucuggcugccuaugcaaaguucgucgcugccuggacgcugaaagcggccgcuugaggacuagucccuguucccagagcccacuuuuuuuucuuuuuuugaaauaaaauagccugucuuucagaucucaaaggcucuuuucagagccaccaaaaaaaaaaaaaaaaaaaaaaaaaaaaaaaaaaaaaaaaaaaaaaaaaaaaaaaaaaaaaaaaaaaaaaaaaaaaaaaaaaaaaaaaaaaaaaaaaaaaagaauu

SEQ ID NO: 9519 - RNA, 1306 nt, Artificial Sequence
  mRNA Design a-1 (hSL-A100-N5) comprising derived and/or modified sequence from Pf(3D7)__XP_001351122.1__HsALB_Pf-CSP(19-272)_L(AAY)_Pf-CSP(310-3 27)_L(AAY)_Pf-CSP(346-375)_L(AAY)_PADRE (opt3)
aggagagucccgcagucggcguccagcggcucugcuuguucgugugugugucguugcaggccuuauucaagcuuaccaugaagugggugaccuucaucagccugcucuuucuuuucuccucugccuacucacuguuucaggaguaucaaugcuacggcaguagcuccaacacaagagucuugaaugaauuaaacuaugacaaugcugggacuaaccuguacaaugagcuagaaaugaacuauuacggaaaacaggagaauugguauucucucaagaaaaacucgaggucacugggugaaaaugaugacggcaacaaugaggauaacgagaaacuucggaagcccaagcacaagaaacugaagcagccugcagacgggaauccagauccgaacgccaaucccaacguugacccuaacgcgaauccaaacguggaucccaaugcuaacccuaauguagacccaaacgccaaucccaacgcaaauccuaacgccaauccaaacgcuaauccgaacgcaaaucccaacgccaacccuaaugcuaacccaaaugccaaccccaaugcgaacccuaaugcaaacccaaaugccaaccccaaugcuaacccgaaugccaacccuaaugcaaaccccaacgcuaauccaaacgccaauccuaacgcgaaucccaacguggauccaaaugccaaccccaaugcaaacccuaaugcuaacccaaaugccaacccgaaugcuaaccccaacgccaauccuaacgcaaauccaaacgccaaucccaacgcuaauccuaacgcgaauccaaacgcaaaucccaacgccaauccgaacgcuaauccuaacgccaauccaaacgcaaaccccaaugccaacccuaaugcuaaccccaaugccaacccagcagcguacgaaccuagcgacaaacauauuaaggaguacuugaauaaaauacagaacagucucgcugccuauaucaagcccggauccgcaaauaagccaaaagaugaacuggacuacgccaacgauauugagaagaaaaucuguaagauggagaaaugcucugcugccuaugcaaaguucgucgcugccuggacgcugaaagcggccgcuugaggacuagucccuguucccagagcccacuuuuuuuucuuuuuuugaaauaaaauagccugucuuucagaucucaaaggcucuuuucagagccaccaaaaaaaaaaaaaaaaaaaaaaaaaaaaaaaaaaaaaaaaaaaaaaaaaaaaaaaaaaaaaaaaaaaaaaaaaaaaaaaaaaaaaaaaaaaaaaaaaaaaagaauu

SEQ ID NO: 9520 - RNA, 1360 nt, Artificial Sequence
  mRNA Design a-1 (hSL-A100-N5) comprising derived and/or modified sequence from Pf(3D7)__XP_001351122.1__HsALB_Pf-CSP(19-272)_L(AAY)_Pf-CSP(310-3 27)_L(AAY)_Pf-CSP(346-375)_L(AAY)_PADRE_L(AAY)_P2 (opt3)
aggagagucccgcagucggcguccagcggcucugcuuguucgugugugugucguugcaggccuuauucaagcuuaccaugaagugggugaccuucaucagccugcucuuucuuuucuccucugccuacucacuguuucaggaguaucaaugcuacggcaguagcuccaacacaagagucuugaaugaauuaaacuaugacaaugcugggacuaaccuguacaaugagcuagaaaugaacuauuacggaaaacaggagaauugguauucucucaagaaaaacucgaggucacugggugaaaaugaugacggcaacaaugaggauaacgagaaacuucggaagcccaagcacaagaaacugaagcagccugcagacgggaauccagauccgaacgccaaucccaacguugacccuaacgcgaauccaaacguggaucccaaugcuaacccuaauguagacccaaacgccaaucccaacgcaaauccuaacgccaauccaaacgcuaauccgaacgcaaaucccaacgccaacccuaaugcuaacccaaaugccaaccccaaugcgaacccuaaugcaaacccaaaugccaaccccaaugcuaacccgaaugccaacccuaaugcaaaccccaacgcuaauccaaacgccaauccuaacgcgaaucccaacguggauccaaaugccaaccccaaugcaaacccuaaugcuaacccaaaugccaacccgaaugcuaaccccaacgccaauccuaacgcaaauccaaacgccaaucccaacgcuaauccuaacgcgaauccaaacgcaaaucccaacgccaauccgaacgcuaauccuaacgccaauccaaacgcaaaccccaaugccaacccuaaugcuaaccccaaugccaacccagcagcguacgaaccuagcgacaaacauauuaaggaguacuugaauaaaauacagaacagucucgcugccuauaucaagcccggauccgcaaauaagccaaaagaugaacuggacuacgccaacgauauugagaagaaaaucuguaagauggagaaaugcucugcugccuaugcaaaguucgucgcugccuggacgcugaaagcggccgcugcagccuaccaauauauuaaggcuaauagcaaguuuaucggcauaaccgaacucugaggacuagucccuguucccagagcccacuuuuuuuucuuuuuuugaaauaaaauagccugucuuucagaucucaaaggcucuuuucagagccaccaaaaaaaaaaaaaaaaaaaaaaaaaaaaaaaaaaaaaaaaaaaaaaaaaaaaaaaaaaaaaaaaaaaaaaaaaaaaaaaaaaaaaaaaaaaaaaaaaaaaagaauu

SEQ ID NO: 9521 - RNA, 1324 nt, Artificial Sequence
  mRNA Design a-1 (hSL-A100-N5) comprising derived and/or modified sequence from Pf(3D7)__XP_001351122.1__HsALB_Pf-CSP(19-272)_L(AAY)_Pf-CSP(310-3 27)_Linker (AAY)_Pf-CSP(346-397) (opt3)
aggagagucccgcagucggcguccagcggcucugcuuguucgugugugugucguugcaggccuuauucaagcuuaccaugaagugggugaccuucaucagccugcucuuucuuuucuccucugccuacucacuguuucaggaguaucaaugcuacggcaguagcuccaacacaagagucuugaaugaauuaaacuaugacaaugcugggacuaaccuguacaaugagcuagaaaugaacuauuacggaaaacaggagaauugguauucucucaagaaaaacucgaggucacugggugaaaaugaugacggcaacaaugaggauaacgagaaguuacggaaacccaagcacaagaaacugaagcagccugcagacgggaauccagauccgaacgccaaucccaacguugacccuaacgcgaauccaaacguggaucccaaugcuaacccuaauguagacccaaacgccaaucccaacgcaaauccuaacgccaauccaaacgcuaauccgaacgcaaaucccaacgccaacccuaaugcuaacccaaaugccaaccccaaugcgaacccuaaugcaaacccaaaugccaaccccaaugcuaacccgaaugccaacccuaaugcaaaccccaacgcuaauccaaacgccaauccuaacgcgaaucccaacguggauccaaaugccaaccccaaugcaaacccuaaugcuaacccaaaugccaacccgaaugcuaaccccaacgccaauccuaacgcaaauccaaacgccaaucccaacgcuaauccuaacgcgaauccaaacgcaaaucccaacgccaauccgaacgcuaauccuaacgccaauccaaacgcaaaccccaaugccaacccuaaugcuaaccccaaugccaacccagcagcguacgaaccuagcgacaaacauauuaaggaguacuugaauaaaauacagaacagucucgcugccuauaucaagcccggauccgcaaauaagccaaaagaugaacuggacuacgccaacgauauugagaagaaaaucuguaagauggagaaaugcucuagcgucuucaaugugguuaacuccucaauuggccugaucauggugcucaguuuucuuuuccugaauugaggacuagucccuguucccagagcccacuuuuuuuucuuuuuuugaaauaaaauagccugucuuucagaucucaaaggcucuuuucagagccaccaaaaaaaaaaaaaaaaaaaaaaaaaaaaaaaaaaaaaaaaaaaaaaaaaaaaaaaaaaaaaaaaaaaaaaaaaaaaaaaaaaaaaaaaaaaaaaaaaaaaagaauu

SEQ ID NO: 9522 - RNA, 1924 nt, Artificial Sequence
  mRNA Design a-1 (hSL-A100-N5) comprising derived and/or modified sequence from Pf(3D7)__XP_001351122.1__LumSynt_L(GGS4-GGG)_Pf-CSP(19-397) (opt4)
aggagagucccgcagucggcguccagcggcucugcuuguucgugugugugucguugcaggccuuauucaagcuuaccaugcagaucuacgagggcaagcugaccgccgagggccugagauucggcaucguggccagcagauucaaccacgcccugguggacagacugguggagggcgccaucgacgccaucgugagacacggcggcagagaggaggacaucacccuggugagagugcccggcagcugggagauccccguggccgccggcgagcuggccagaaaggaggacaucgacgccgugaucgccaucggcgugcugaucagaggcgccaccccccacuucgacuacaucgccagcgaggugagcaagggccuggccgaccugagccuggagcugagaaagcccaucaccuucggcgugaucaccgccgacacccuggagcaggccaucgagagagccggcaccaagcacggcaacaagggcugggaggccgcccugagcgccaucgagauggccaaccuguucaagagccugagaggcggcagcggcggcagcggcggcagcggcggcagcggcggcggccuguuccaggaguaccagugcuacggcagcagcagcaacaccagagugcugaacgagcugaacuacgacaacgccggcaccaaccuguacaacgagcuggagaugaacuacuacggcaagcaggagaacugguacagccugaagaagaacagcagaagccugggcgagaacgacgacggcaacaacgaggacaacgagaagcugagaaagcccaagcacaagaagcugaagcagcccgccgacggcaaccccgaccccaacgccaaccccaacguggaccccaacgccaaccccaacguggaccccaacgccaaccccaacguggaccccaacgccaaccccaacgccaaccccaacgccaaccccaacgccaaccccaacgccaaccccaacgccaaccccaacgccaaccccaacgccaaccccaacgccaaccccaacgccaaccccaacgccaaccccaacgccaaccccaacgccaaccccaacgccaaccccaacgccaaccccaacgccaaccccaacgccaaccccaacguggaccccaacgccaaccccaacgccaaccccaacgccaaccccaacgccaaccccaacgccaaccccaacgccaaccccaacgccaaccccaacgccaaccccaacgccaaccccaacgccaaccccaacgccaaccccaacgccaaccccaacgccaaccccaacgccaaccccaacgccaaccccaacgccaaccccaacgccaaccccaacgccaaccccaacaagaacaaccagggcaacggccagggccacaacaugcccaacgaccccaacagaaacguggacgagaacgccaacgccaacagcgccgugaagaacaacaacaacgaggagcccagcgacaagcacaucaaggaguaccugaacaagauccagaacagccugagcaccgaguggagccccugcagcgugaccugcggcaacggcauccaggugagaaucaagcccggcagcgccaacaagcccaaggacgagcuggacuacgccaacgacaucgagaagaagaucugcaagauggagaagugcagcagcguguucaacguggugaacagcagcaucggccugaucauggugcugagcuuccuguuccugaacugaggacuagucccuguucccagagcccacuuuuuuuucuuuuuuugaaauaaaauagccugucuuucagaucucaaaggcucuuuucagagccaccaaaaaaaaaaaaaaaaaaaaaaaaaaaaaaaaaaaaaaaaaaaaaaaaaaaaaaaaaaaaaaaaaaaaaaaaaaaaaaaaaaaaaaaaaaaaaaaaaaaaagaauu

SEQ ID NO: 9523 - RNA, 1786 nt, Artificial Sequence
  mRNA Design a-1 (hSL-A100-N5) comprising derived and/or modified sequence from Pf(3D7)__XP_001351122.1__HsALB_Pf-CSP(19-272)_L(PVTN)_HBsAg (opt4)
aggagagucccgcagucggcguccagcggcucugcuuguucgugugugugucguugcaggccuuauucaagcuuaccaugaagugggugaccuucaucagccugcuguuccuguucagcagcgccuacagccuguuccaggaguaccagugcuacggcagcagcagcaacaccagagugcugaacgagcugaacuacgacaacgccggcaccaaccuguacaacgagcuggagaugaacuacuacggcaagcaggagaacugguacagccugaagaagaacagcagaagccugggcgagaacgacgacggcaacaacgaggacaacgagaagcugagaaagcccaagcacaagaagcugaagcagcccgccgacggcaaccccgaccccaacgccaaccccaacguggaccccaacgccaaccccaacguggaccccaacgccaaccccaacguggaccccaacgccaaccccaacgccaaccccaacgccaaccccaacgccaaccccaacgccaaccccaacgccaaccccaacgccaaccccaacgccaaccccaacgccaaccccaacgccaaccccaacgccaaccccaacgccaaccccaacgccaaccccaacgccaaccccaacgccaaccccaacgccaaccccaacgccaaccccaacguggaccccaacgccaaccccaacgccaaccccaacgccaaccccaacgccaaccccaacgccaaccccaacgccaaccccaacgccaaccccaacgccaaccccaacgccaaccccaacgccaaccccaacgccaaccccaacgccaaccccaacgccaaccccaacgccaaccccaacgccaaccccaacgccaaccccaacgccaaccccaacgccaacccccccgugaccaacauggagaacaucaccagcggcuuccugggcccccugcuggugcugcaggccggcuucuuccugcugaccagaauccugaccaucccccagagccuggacagcugguggaccagccugaacuuccugggcggcagccccgugugccugggccagaacagccagagccccaccagcaaccacagccccaccagcugcccccccaucugccccggcuacagauggaugugccugagaagauucaucaucuuccuguucauccugcugcugugccugaucuuccugcuggugcugcuggacuaccagggcaugcugcccgugugcccccugauccccggcagcaccaccaccaacaccggccccugcaagaccugcaccacccccgcccagggcaacagcauguuccccagcugcugcugcaccaagcccaccgacggcaacugcaccugcauccccauccccagcagcugggccuucgccaaguaccugugggagugggccagcgugagauucagcuggcugagccugcuggugcccuucgugcagugguucgugggccugagccccaccguguggcugagcgccaucuggaugaugugguacuggggccccagccuguacagcaucgugagccccuucaucccccugcugcccaucuucuucugccuguggguguacaucugaggacuagucccuguucccagagcccacuuuuuuuucuuuuuuugaaauaaaauagccugucuuucagaucucaaaggcucuuuucagagccaccaaaaaaaaaaaaaaaaaaaaaaaaaaaaaaaaaaaaaaaaaaaaaaaaaaaaaaaaaaaaaaaaaaaaaaaaaaaaaaaaaaaaaaaaaaaaaaaaaaaaagaauu

SEQ ID NO: 9524 - RNA, 1903 nt, Artificial Sequence
  mRNA Design a-1 (hSL-A100-N5) comprising derived and/or modified sequence from Pf(3D7)__XP_001351122.1__HsALB_Pf-CSP(19-272)_L(AAY)_Pf-CSP(346-3 65)_L(AAY)_PADRE_L(PVTN)_HBsAg (opt4)
aggagagucccgcagucggcguccagcggcucugcuuguucgugugugugucguugcaggccuuauucaagcuuaccaugaagugggugaccuucaucagccugcuguuccuguucagcagcgccuacagccuguuccaggaguaccagugcuacggcagcagcagcaacaccagagugcugaacgagcugaacuacgacaacgccggcaccaaccuguacaacgagcuggagaugaacuacuacggcaagcaggagaacugguacagccugaagaagaacagcagaagccugggcgagaacgacgacggcaacaacgaggacaacgagaagcugagaaagcccaagcacaagaagcugaagcagcccgccgacggcaaccccgaccccaacgccaaccccaacguggaccccaacgccaaccccaacguggaccccaacgccaaccccaacguggaccccaacgccaaccccaacgccaaccccaacgccaaccccaacgccaaccccaacgccaaccccaacgccaaccccaacgccaaccccaacgccaaccccaacgccaaccccaacgccaaccccaacgccaaccccaacgccaaccccaacgccaaccccaacgccaaccccaacgccaaccccaacgccaaccccaacgccaaccccaacguggaccccaacgccaaccccaacgccaaccccaacgccaaccccaacgccaaccccaacgccaaccccaacgccaaccccaacgccaaccccaacgccaaccccaacgccaaccccaacgccaaccccaacgccaaccccaacgccaaccccaacgccaaccccaacgccaaccccaacgccaaccccaacgccaaccccaacgccaaccccaacgccaaccccgccgccuacaucaagcccggcagcgccaacaagcccaaggacgagcuggacuacgccaacgacaucgaggccgccuacgccaaguucguggccgccuggacccugaaggccgccgcccccgugaccaacauggagaacaucaccagcggcuuccugggcccccugcuggugcugcaggccggcuucuuccugcugaccagaauccugaccaucccccagagccuggacagcugguggaccagccugaacuuccugggcggcagccccgugugccugggccagaacagccagagccccaccagcaaccacagccccaccagcugcccccccaucugccccggcuacagauggaugugccugagaagauucaucaucuuccuguucauccugcugcugugccugaucuuccugcuggugcugcuggacuaccagggcaugcugcccgugugcccccugauccccggcagcaccaccaccaacaccggccccugcaagaccugcaccacccccgcccagggcaacagcauguuccccagcugcugcugcaccaagcccaccgacggcaacugcaccugcauccccauccccagcagcugggccuucgccaaguaccugugggagugggccagcgugagauucagcuggcugagccugcuggugcccuucgugcagugguucgugggccugagccccaccguguggcugagcgccaucuggaugaugugguacuggggccccagccuguacagcaucgugagccccuucaucccccugcugcccaucuucuucugccuguggguguacaucugaggacuagucccuguucccagagcccacuuuuuuuucuuuuuuugaaauaaaauagccugucuuucagaucucaaaggcucuuuucagagccaccaaaaaaaaaaaaaaaaaaaaaaaaaaaaaaaaaaaaaaaaaaaaaaaaaaaaaaaaaaaaaaaaaaaaaaaaaaaaaaaaaaaaaaaaaaaaaaaaaaaaagaauu

SEQ ID NO: 9525 - RNA, 2122 nt, Artificial Sequence
  mRNA Design a-1 (hSL-A100-N5) comprising derived and/or modified sequence from Pf(3D7)__XP_001351122.1__HsALB_Pf-CSP(19-384)_L(PVTN)_HBsAg (opt4)
aggagagucccgcagucggcguccagcggcucugcuuguucgugugugugucguugcaggccuuauucaagcuuaccaugaagugggugaccuucaucagccugcuguuccuguucagcagcgccuacagccuguuccaggaguaccagugcuacggcagcagcagcaacaccagagugcugaacgagcugaacuacgacaacgccggcaccaaccuguacaacgagcuggagaugaacuacuacggcaagcaggagaacugguacagccugaagaagaacagcagaagccugggcgagaacgacgacggcaacaacgaggacaacgagaagcugagaaagcccaagcacaagaagcugaagcagcccgccgacggcaaccccgaccccaacgccaaccccaacguggaccccaacgccaaccccaacguggaccccaacgccaaccccaacguggaccccaacgccaaccccaacgccaaccccaacgccaaccccaacgccaaccccaacgccaaccccaacgccaaccccaacgccaaccccaacgccaaccccaacgccaaccccaacgccaaccccaacgccaaccccaacgccaaccccaacgccaaccccaacgccaaccccaacgccaaccccaacgccaaccccaacgccaaccccaacguggaccccaacgccaaccccaacgccaaccccaacgccaaccccaacgccaaccccaacgccaaccccaacgccaaccccaacgccaaccccaacgccaaccccaacgccaaccccaacgccaaccccaacgccaaccccaacgccaaccccaacgccaaccccaacgccaaccccaacgccaaccccaacgccaaccccaacgccaaccccaacgccaaccccaacaagaacaaccagggcaacggccagggccacaacaugcccaacgaccccaacagaaacguggacgagaacgccaacgccaacagcgccgugaagaacaacaacaacgaggagcccagcgacaagcacaucaaggaguaccugaacaagauccagaacagccugagcaccgaguggagccccugcagcgugaccugcggcaacggcauccaggugagaaucaagcccggcagcgccaacaagcccaaggacgagcuggacuacgccaacgacaucgagaagaagaucugcaagauggagaagugcagcagcguguucaacguggugaacagcagccccgugaccaacauggagaacaucaccagcggcuuccugggcccccugcuggugcugcaggccggcuucuuccugcugaccagaauccugaccaucccccagagccuggacagcugguggaccagccugaacuuccugggcggcagccccgugugccugggccagaacagccagagccccaccagcaaccacagccccaccagcugcccccccaucugccccggcuacagauggaugugccugagaagauucaucaucuuccuguucauccugcugcugugccugaucuuccugcuggugcugcuggacuaccagggcaugcugcccgugugcccccugauccccggcagcaccaccaccaacaccggccccugcaagaccugcaccacccccgcccagggcaacagcauguuccccagcugcugcugcaccaagcccaccgacggcaacugcaccugcauccccauccccagcagcugggccuucgccaaguaccugugggagugggccagcgugagauucagcuggcugagccugcuggugcccuucgugcagugguucgugggccugagccccaccguguggcugagcgccaucuggaugaugugguacuggggccccagccuguacagcaucgugagccccuucaucccccugcugcccaucuucuucugccuguggguguacaucugaggacuagucccuguucccagagcccacuuuuuuuucuuuuuuugaaauaaaauagccugucuuucagaucucaaaggcucuuuucagagccaccaaaaaaaaaaaaaaaaaaaaaaaaaaaaaaaaaaaaaaaaaaaaaaaaaaaaaaaaaaaaaaaaaaaaaaaaaaaaaaaaaaaaaaaaaaaaaaaaaaaaagaauu

SEQ ID NO: 9526 - RNA, 1939 nt, Artificial Sequence
  mRNA Design a-1 (hSL-A100-N5) comprising derived and/or modified sequence from Pf(3D7)__XP_001351122.1__HsALB_Pf-CSP(19-384)_L(SGG)_Ferritin (opt4)
aggagagucccgcagucggcguccagcggcucugcuuguucgugugugugucguugcaggccuuauucaagcuuaccaugaagugggugaccuucaucagccugcuguuccuguucagcagcgccuacagccuguuccaggaguaccagugcuacggcagcagcagcaacaccagagugcugaacgagcugaacuacgacaacgccggcaccaaccuguacaacgagcuggagaugaacuacuacggcaagcaggagaacugguacagccugaagaagaacagcagaagccugggcgagaacgacgacggcaacaacgaggacaacgagaagcugagaaagcccaagcacaagaagcugaagcagcccgccgacggcaaccccgaccccaacgccaaccccaacguggaccccaacgccaaccccaacguggaccccaacgccaaccccaacguggaccccaacgccaaccccaacgccaaccccaacgccaaccccaacgccaaccccaacgccaaccccaacgccaaccccaacgccaaccccaacgccaaccccaacgccaaccccaacgccaaccccaacgccaaccccaacgccaaccccaacgccaaccccaacgccaaccccaacgccaaccccaacgccaaccccaacgccaaccccaacguggaccccaacgccaaccccaacgccaaccccaacgccaaccccaacgccaaccccaacgccaaccccaacgccaaccccaacgccaaccccaacgccaaccccaacgccaaccccaacgccaaccccaacgccaaccccaacgccaaccccaacgccaaccccaacgccaaccccaacgccaaccccaacgccaaccccaacgccaaccccaacgccaaccccaacaagaacaaccagggcaacggccagggccacaacaugcccaacgaccccaacagaaacguggacgagaacgccaacgccaacagcgccgugaagaacaacaacaacgaggagcccagcgacaagcacaucaaggaguaccugaacaagauccagaacagccugagcaccgaguggagccccugcagcgugaccugcggcaacggcauccaggugagaaucaagcccggcagcgccaacaagcccaaggacgagcuggacuacgccaacgacaucgagaagaagaucugcaagauggagaagugcagcagcguguucaacguggugaacagcagcagcggcggccugagcaaggacaucaucaagcugcugaacgagcaggugaacaaggagaugaacagcagcaaccuguacaugagcaugagcagcuggugcuacacccacagccuggacggcgccggccuguuccuguucgaccacgccgccgaggaguacgagcacgccaagaagcugaucaucuuccugaacgagaacaacgugcccgugcagcugaccagcaucagcgcccccgagcacaaguucgagggccugacccagaucuuccagaaggccuacgagcacgagcagcacaucagcgagagcaucaacaacaucguggaccacgccaucaagagcaaggaccacgccaccuucaacuuccugcagugguacguggccgagcagcacgaggaggaggugcuguucaaggacauccuggacaagaucgagcugaucggcaacgagaaccacggccuguaccuggccgaccaguacgugaagggcaucgccaagagcagaaagagcugaggacuagucccuguucccagagcccacuuuuuuuucuuuuuuugaaauaaaauagccugucuuucagaucucaaaggcucuuuucagagccaccaaaaaaaaaaaaaaaaaaaaaaaaaaaaaaaaaaaaaaaaaaaaaaaaaaaaaaaaaaaaaaaaaaaaaaaaaaaaaaaaaaaaaaaaaaaaaaaaaaaaagaauu

SEQ ID NO: 9527 - RNA, 1900 nt, Artificial Sequence
  mRNA Design a-1 (hSL-A100-N5) comprising derived and/or modified sequence from Pf(3D7)__XP_001351122.1__HsALB_Pf-CSP(93-384)_L(PVTN)_HBsAg (opt4)
aggagagucccgcagucggcguccagcggcucugcuuguucgugugugugucguugcaggccuuauucaagcuuaccaugaagugggugaccuucaucagccugcuguuccuguucagcagcgccuacagcaagcugaagcagcccgccgacggcaaccccgaccccaacgccaaccccaacguggaccccaacgccaaccccaacguggaccccaacgccaaccccaacguggaccccaacgccaaccccaacgccaaccccaacgccaaccccaacgccaaccccaacgccaaccccaacgccaaccccaacgccaaccccaacgccaaccccaacgccaaccccaacgccaaccccaacgccaaccccaacgccaaccccaacgccaaccccaacgccaaccccaacgccaaccccaacgccaaccccaacgccaaccccaacguggaccccaacgccaaccccaacgccaaccccaacgccaaccccaacgccaaccccaacgccaaccccaacgccaaccccaacgccaaccccaacgccaaccccaacgccaaccccaacgccaaccccaacgccaaccccaacgccaaccccaacgccaaccccaacgccaaccccaacgccaaccccaacgccaaccccaacgccaaccccaacgccaaccccaacaagaacaaccagggcaacggccagggccacaacaugcccaacgaccccaacagaaacguggacgagaacgccaacgccaacagcgccgugaagaacaacaacaacgaggagcccagcgacaagcacaucaaggaguaccugaacaagauccagaacagccugagcaccgaguggagccccugcagcgugaccugcggcaacggcauccaggugagaaucaagcccggcagcgccaacaagcccaaggacgagcuggacuacgccaacgacaucgagaagaagaucugcaagauggagaagugcagcagcguguucaacguggugaacagcagccccgugaccaacauggagaacaucaccagcggcuuccugggcccccugcuggugcugcaggccggcuucuuccugcugaccagaauccugaccaucccccagagccuggacagcugguggaccagccugaacuuccugggcggcagccccgugugccugggccagaacagccagagccccaccagcaaccacagccccaccagcugcccccccaucugccccggcuacagauggaugugccugagaagauucaucaucuuccuguucauccugcugcugugccugaucuuccugcuggugcugcuggacuaccagggcaugcugcccgugugcccccugauccccggcagcaccaccaccaacaccggccccugcaagaccugcaccacccccgcccagggcaacagcauguuccccagcugcugcugcaccaagcccaccgacggcaacugcaccugcauccccauccccagcagcugggccuucgccaaguaccugugggagugggccagcgugagauucagcuggcugagccugcuggugcccuucgugcagugguucgugggccugagccccaccguguggcugagcgccaucuggaugaugugguacuggggccccagccuguacagcaucgugagccccuucaucccccugcugcccaucuucuucugccuguggguguacaucugaggacuagucccuguucccagagcccacuuuuuuuucuuuuuuugaaauaaaauagccugucuuucagaucucaaaggcucuuuucagagccaccaaaaaaaaaaaaaaaaaaaaaaaaaaaaaaaaaaaaaaaaaaaaaaaaaaaaaaaaaaaaaaaaaaaaaaaaaaaaaaaaaaaaaaaaaaaaaaaaaaaaagaauu

SEQ ID NO: 9528 - RNA, 1561 nt, Artificial Sequence; identical to SEQ ID NO: 7436
  mRNA Design a-1 (hSL-A100-N5) comprising derived and/or modified sequence from Pf(3D7)__XP_001351122.1__HsALB_Pf-CSP(199-377)_L(PVTN)_HBsAg (opt4)

SEQ ID NO: 9529 - RNA, 1258 nt, Artificial Sequence
  mRNA Design a-1 (hSL-A100-N5) comprising derived and/or modified sequence from Pf(3D7)__XP_001351122.1__HsALB_Pf-CSP(19-272)_L(AAY)_Pf-CSP(346-3 75)_L(AAY)_Pf-CSP(310-327) (opt4)
aggagagucccgcagucggcguccagcggcucugcuuguucgugugugugucguugcaggccuuauucaagcuuaccaugaagugggugaccuucaucagccugcuguuccuguucagcagcgccuacagccuguuccaggaguaccagugcuacggcagcagcagcaacaccagagugcugaacgagcugaacuacgacaacgccggcaccaaccuguacaacgagcuggagaugaacuacuacggcaagcaggagaacugguacagccugaagaagaacagcagaagccugggcgagaacgacgacggcaacaacgaggacaacgagaagcugagaaagcccaagcacaagaagcugaagcagcccgccgacggcaaccccgaccccaacgccaaccccaacguggaccccaacgccaaccccaacguggaccccaacgccaaccccaacguggaccccaacgccaaccccaacgccaaccccaacgccaaccccaacgccaaccccaacgccaaccccaacgccaaccccaacgccaaccccaacgccaaccccaacgccaaccccaacgccaaccccaacgccaaccccaacgccaaccccaacgccaaccccaacgccaaccccaacgccaaccccaacgccaaccccaacgccaaccccaacguggaccccaacgccaaccccaacgccaaccccaacgccaaccccaacgccaaccccaacgccaaccccaacgccaaccccaacgccaaccccaacgccaaccccaacgccaaccccaacgccaaccccaacgccaaccccaacgccaaccccaacgccaaccccaacgccaaccccaacgccaaccccaacgccaaccccaacgccaaccccaacgccaaccccgccgccuacaucaagcccggcagcgccaacaagcccaaggacgagcuggacuacgccaacgacaucgagaagaagaucugcaagauggagaagugcagcgccgccuacgagcccagcgacaagcacaucaaggaguaccugaacaagauccagaacagccugugaggacuagucccuguucccagagcccacuuuuuuuucuuuuuuugaaauaaaauagccugucuuucagaucucaaaggcucuuuucagagccaccaaaaaaaaaaaaaaaaaaaaaaaaaaaaaaaaaaaaaaaaaaaaaaaaaaaaaaaaaaaaaaaaaaaaaaaaaaaaaaaaaaaaaaaaaaaaaaaaaaaaagaauu

SEQ ID NO: 9530 - RNA, 1306 nt, Artificial Sequence
  mRNA Design a-1 (hSL-A100-N5) comprising derived and/or modified sequence from Pf(3D7)__XP_001351122.1__HsALB_Pf-CSP(19-272)_L(AAY)_Pf-CSP(346-3 75)_L(AAY)_Pf-CSP(310-327)_L(AAY)_PADRE (opt4)
aggagagucccgcagucggcguccagcggcucugcuuguucgugugugugucguugcaggccuuauucaagcuuaccaugaagugggugaccuucaucagccugcuguuccuguucagcagcgccuacagccuguuccaggaguaccagugcuacggcagcagcagcaacaccagagugcugaacgagcugaacuacgacaacgccggcaccaaccuguacaacgagcuggagaugaacuacuacggcaagcaggagaacugguacagccugaagaagaacagcagaagccugggcgagaacgacgacggcaacaacgaggacaacgagaagcugagaaagcccaagcacaagaagcugaagcagcccgccgacggcaaccccgaccccaacgccaaccccaacguggaccccaacgccaaccccaacguggaccccaacgccaaccccaacguggaccccaacgccaaccccaacgccaaccccaacgccaaccccaacgccaaccccaacgccaaccccaacgccaaccccaacgccaaccccaacgccaaccccaacgccaaccccaacgccaaccccaacgccaaccccaacgccaaccccaacgccaaccccaacgccaaccccaacgccaaccccaacgccaaccccaacgccaaccccaacguggaccccaacgccaaccccaacgccaaccccaacgccaaccccaacgccaaccccaacgccaaccccaacgccaaccccaacgccaaccccaacgccaaccccaacgccaaccccaacgccaaccccaacgccaaccccaacgccaaccccaacgccaaccccaacgccaaccccaacgccaaccccaacgccaaccccaacgccaaccccaacgccaaccccgccgccuacaucaagcccggcagcgccaacaagcccaaggacgagcuggacuacgccaacgacaucgagaagaagaucugcaagauggagaagugcagcgccgccuacgagcccagcgacaagcacaucaaggaguaccugaacaagauccagaacagccuggccgccuacgccaaguucguggccgccuggacccugaaggccgccgccugaggacuagucccuguucccagagcccacuuuuuuuucuuuuuuugaaauaaaauagccugucuuucagaucucaaaggcucuuuucagagccaccaaaaaaaaaaaaaaaaaaaaaaaaaaaaaaaaaaaaaaaaaaaaaaaaaaaaaaaaaaaaaaaaaaaaaaaaaaaaaaaaaaaaaaaaaaaaaaaaaaaaagaauu

SEQ ID NO: 9531 - RNA, 1306 nt, Artificial Sequence
  mRNA Design a-1 (hSL-A100-N5) comprising derived and/or modified sequence from Pf(3D7)__XP_001351122.1__HsALB_Pf-CSP(19-272)_L(AAY)_Pf-CSP(310-3 27)_L(AAY)_Pf-CSP(346-375)_L(AAY)_PADRE (opt4)
aggagagucccgcagucggcguccagcggcucugcuuguucgugugugugucguugcaggccuuauucaagcuuaccaugaagugggugaccuucaucagccugcuguuccuguucagcagcgccuacagccuguuccaggaguaccagugcuacggcagcagcagcaacaccagagugcugaacgagcugaacuacgacaacgccggcaccaaccuguacaacgagcuggagaugaacuacuacggcaagcaggagaacugguacagccugaagaagaacagcagaagccugggcgagaacgacgacggcaacaacgaggacaacgagaagcugagaaagcccaagcacaagaagcugaagcagcccgccgacggcaaccccgaccccaacgccaaccccaacguggaccccaacgccaaccccaacguggaccccaacgccaaccccaacguggaccccaacgccaaccccaacgccaaccccaacgccaaccccaacgccaaccccaacgccaaccccaacgccaaccccaacgccaaccccaacgccaaccccaacgccaaccccaacgccaaccccaacgccaaccccaacgccaaccccaacgccaaccccaacgccaaccccaacgccaaccccaacgccaaccccaacgccaaccccaacguggaccccaacgccaaccccaacgccaaccccaacgccaaccccaacgccaaccccaacgccaaccccaacgccaaccccaacgccaaccccaacgccaaccccaacgccaaccccaacgccaaccccaacgccaaccccaacgccaaccccaacgccaaccccaacgccaaccccaacgccaaccccaacgccaaccccaacgccaaccccaacgccaaccccgccgccuacgagcccagcgacaagcacaucaaggaguaccugaacaagauccagaacagccuggccgccuacaucaagcccggcagcgccaacaagcccaaggacgagcuggacuacgccaacgacaucgagaagaagaucugcaagauggagaagugcagcgccgccuacgccaaguucguggccgccuggacccugaaggccgccgccugaggacuagucccuguucccagagcccacuuuuuuuucuuuuuuugaaauaaaauagccugucuuucagaucucaaaggcucuuuucagagccaccaaaaaaaaaaaaaaaaaaaaaaaaaaaaaaaaaaaaaaaaaaaaaaaaaaaaaaaaaaaaaaaaaaaaaaaaaaaaaaaaaaaaaaaaaaaaaaaaaaaaagaauu

SEQ ID NO: 9532 - RNA, 1360 nt, Artificial Sequence
  mRNA Design a-1 (hSL-A100-N5) comprising derived and/or modified sequence from Pf(3D7)__XP_001351122.1__HsALB_Pf-CSP(19-272)_L(AAY)_Pf-CSP(310-3 27)_L(AAY)_Pf-CSP(346-375)_L(AAY)_PADRE_L(AAY)_P2 (opt4)
aggagagucccgcagucggcguccagcggcucugcuuguucgugugugugucguugcaggccuuauucaagcuuaccaugaagugggugaccuucaucagccugcuguuccuguucagcagcgccuacagccuguuccaggaguaccagugcuacggcagcagcagcaacaccagagugcugaacgagcugaacuacgacaacgccggcaccaaccuguacaacgagcuggagaugaacuacuacggcaagcaggagaacugguacagccugaagaagaacagcagaagccugggcgagaacgacgacggcaacaacgaggacaacgagaagcugagaaagcccaagcacaagaagcugaagcagcccgccgacggcaaccccgaccccaacgccaaccccaacguggaccccaacgccaaccccaacguggaccccaacgccaaccccaacguggaccccaacgccaaccccaacgccaaccccaacgccaaccccaacgccaaccccaacgccaaccccaacgccaaccccaacgccaaccccaacgccaaccccaacgccaaccccaacgccaaccccaacgccaaccccaacgccaaccccaacgccaaccccaacgccaaccccaacgccaaccccaacgccaaccccaacgccaaccccaacguggaccccaacgccaaccccaacgccaaccccaacgccaaccccaacgccaaccccaacgccaaccccaacgccaaccccaacgccaaccccaacgccaaccccaacgccaaccccaacgccaaccccaacgccaaccccaacgccaaccccaacgccaaccccaacgccaaccccaacgccaaccccaacgccaaccccaacgccaaccccaacgccaaccccgccgccuacgagcccagcgacaagcacaucaaggaguaccugaacaagauccagaacagccuggccgccuacaucaagcccggcagcgccaacaagcccaaggacgagcuggacuacgccaacgacaucgagaagaagaucugcaagauggagaagugcagcgccgccuacgccaaguucguggccgccuggacccugaaggccgccgccgccgccuaccaguacaucaaggccaacagcaaguucaucggcaucaccgagcugugaggacuagucccuguucccagagcccacuuuuuuuucuuuuuuugaaauaaaauagccugucuuucagaucucaaaggcucuuuucagagccaccaaaaaaaaaaaaaaaaaaaaaaaaaaaaaaaaaaaaaaaaaaaaaaaaaaaaaaaaaaaaaaaaaaaaaaaaaaaaaaaaaaaaaaaaaaaaaaaaaaaaagaauu

SEQ ID NO: 9533 - RNA, 1324 nt, Artificial Sequence
  mRNA Design a-1 (hSL-A100-N5) comprising derived and/or modified sequence from Pf(3D7)__XP_001351122.1__HsALB_Pf-CSP(19-272)_L(AAY)_Pf-CSP(310-3 27)_Linker (AAY)_Pf-CSP(346-397) (opt4)
aggagagucccgcagucggcguccagcggcucugcuuguucgugugugugucguugcaggccuuauucaagcuuaccaugaagugggugaccuucaucagccugcuguuccuguucagcagcgccuacagccuguuccaggaguaccagugcuacggcagcagcagcaacaccagagugcugaacgagcugaacuacgacaacgccggcaccaaccuguacaacgagcuggagaugaacuacuacggcaagcaggagaacugguacagccugaagaagaacagcagaagccugggcgagaacgacgacggcaacaacgaggacaacgagaagcugagaaagcccaagcacaagaagcugaagcagcccgccgacggcaaccccgaccccaacgccaaccccaacguggaccccaacgccaaccccaacguggaccccaacgccaaccccaacguggaccccaacgccaaccccaacgccaaccccaacgccaaccccaacgccaaccccaacgccaaccccaacgccaaccccaacgccaaccccaacgccaaccccaacgccaaccccaacgccaaccccaacgccaaccccaacgccaaccccaacgccaaccccaacgccaaccccaacgccaaccccaacgccaaccccaacgccaaccccaacguggaccccaacgccaaccccaacgccaaccccaacgccaaccccaacgccaaccccaacgccaaccccaacgccaaccccaacgccaaccccaacgccaaccccaacgccaaccccaacgccaaccccaacgccaaccccaacgccaaccccaacgccaaccccaacgccaaccccaacgccaaccccaacgccaaccccaacgccaaccccaacgccaaccccgccgccuacgagcccagcgacaagcacaucaaggaguaccugaacaagauccagaacagccuggccgccuacaucaagcccggcagcgccaacaagcccaaggacgagcuggacuacgccaacgacaucgagaagaagaucugcaagauggagaagugcagcagcguguucaacguggugaacagcagcaucggccugaucauggugcugagcuuccuguuccugaacugaggacuagucccuguucccagagcccacuuuuuuuucuuuuuuugaaauaaaauagccugucuuucagaucucaaaggcucuuuucagagccaccaaaaaaaaaaaaaaaaaaaaaaaaaaaaaaaaaaaaaaaaaaaaaaaaaaaaaaaaaaaaaaaaaaaaaaaaaaaaaaaaaaaaaaaaaaaaaaaaaaaaagaauu

SEQ ID NO: 9534 - RNA, 1924 nt, Artificial Sequence
  mRNA Design a-1 (hSL-A100-N5) comprising derived and/or modified sequence from Pf(3D7)__XP_001351122.1__LumSynt_L(GGS4-GGG)_Pf-CSP(19-397) (opt5)
aggagagucccgcagucggcguccagcggcucugcuuguucgugugugugucguugcaggccuuauucaagcuuaccaugcagaucuacgagggcaagcugaccgccgaagggcucagauucggaauuguggcuagccgguuuaaccacgcccuggucgaccgccuuguugagggcgcgaucgaugcuauugugagacaugggggacgggaagaggacaucacacuggugcgcguccccggcuccugggaaauuccuguggccgccggggagcucgcuagaaaagaggauaucgacgccguuaucgcuauuggagugcugauccggggcgccacgccgcacuucgauuauauugcgucugaagucagcaagggccuugccgaccugucccucgagcugcgcaaacccaucaccuuuggggugauuacagcugauacccuggaacaagccaucgagagagcuggaacaaagcauggcaauaaagggugggaggccgcgcucucugccauugaaauggcuaaccuguucaagagccuucggggaggcuccgggggaucuggcggcagcgggggauccggcgggggacuguuucaggaguaccagugcuauggcuccucuuccaauacccgcguucucaacgaacugaauuacgacaacgccgggacaaaucuuuauaacgagcuggaaaugaauuacuauggaaagcaggagaacugguacagccucaaaaagaacucuagaucccugggcgagaaugaugacggcaauaacgaagauaaugagaaacugcggaagccuaaacacaagaagcucaaacaacccgcugacgggaacccugaucccaacgccaauccuaacguggacccgaaugccaaccccaaugucgacccuaacgcuaaucccaacguggauccuaaugcgaaccccaaugccaacccgaaugcuaacccuaaugccaaccccaacgccaauccuaacgcuaaucccaacgccaaucccaacgcgaauccuaacgcuaauccgaacgccaaucccaacgccaauccuaacgcuaaucccaacgccaacccuaaugcuaaccccaaugccaacccgaaugcgaacccuaaugccaaccccaauguggacccuaacgcuaaucccaacgccaauccuaacgcuaaucccaacgccaacccgaaugcgaacccuaaugccaaccccaaugcuaaccccaaugccaacccuaaugcuaacccgaaugccaaccccaaugccaacccuaaugcuaaccccaaugcgaacccuaacgccaaucccaacgcuaauccuaacgccaaucccaacgccaauccgaacgcuaauccuaacaagaauaaccagggaaauggccaggggcauaacaugcccaaugauccuaaccgcaacgucgacgaaaaugccaacgcgaauagcgcuguuaaaaacaauaacaaugaggaacccucugauaagcacaucaaagaguaccugaacaagauccagaauagccuuagcaccgagugguccccguguucugugacgugcggaaacggcauucaagugagaaucaaaccugggagcgccaauaagcccaaggacgaacuggauuaugccaacgacauugagaaaaagaucuguaaaauggaaaagugcuccagcgucuucaaugugguuaacucuuccauuggccucaucauggugcugagcuuucuuuuccugaauugaggacuagucccuguucccagagcccacuuuuuuuucuuuuuuugaaauaaaauagccugucuuucagaucucaaaggcucuuuucagagccaccaaaaaaaaaaaaaaaaaaaaaaaaaaaaaaaaaaaaaaaaaaaaaaaaaaaaaaaaaaaaaaaaaaaaaaaaaaaaaaaaaaaaaaaaaaaaaaaaaaaaagaauu

SEQ ID NO: 9535 - RNA, 1786 nt, Artificial Sequence
  mRNA Design a-1 (hSL-A100-N5) comprising derived and/or modified sequence from Pf(3D7)__XP_001351122.1__HsALB_Pf-CSP(19-272)_L(PVTN)_HBsAg (opt5)
aggagagucccgcagucggcguccagcggcucugcuuguucgugugugugucguugcaggccuuauucaagcuuaccaugaagugggugaccuucaucagccugcucuuucuguucuccucugccuacagccuuuuucaggaguaucaaugcuacggcuccucuagcaacacaagaguccugaaugaacucaacuaugacaaugcugggacgaaccuguacaaugagcuugaaaugaacuauuacggaaaacaggagaauugguauucccugaagaaaaacucucggagccucggcgaaaaugaugacgggaacaaugaggauaacgagaagcugcgcaaacccaagcacaagaaacugaagcagccugccgacggaaauccggaucccaacgcgaauccuaacguugaccccaacgcuaauccuaacguggaucccaaugccaacccuaauguggacccgaacgccaaucccaacgcuaauccuaacgccaaucccaacgcuaauccuaacgccaaucccaacgcgaacccgaaugccaacccuaaugcuaaccccaaugccaacccuaaugcuaaccccaaugccaaccccaaugcgaacccuaaugccaacccgaaugcuaaccccaacgccaauccuaacgcuaaucccaacgccaauccuaacgucgaucccaaugccaacccgaaugcuaacccuaaugcgaaccccaaugccaacccuaaugcuaaccccaacgccaauccuaacgccaaucccaacgcuaauccgaacgccaauccuaacgcgaaucccaacgcuaaucccaacgccaauccuaacgccaauccgaacgcuaaucccaacgccaacccuaaugcuaaccccaaugccaacccuaaugcgaaucccccugugaccaacauggaaaacauuacauccggcuuccucgggccccugcuuguucugcaggccggauuuuuccuccugaccagaauccuuacaauuccgcaaagccuggacucuugguggaccucccucaauuuucugggcggcagcccugugugucuggggcagaacucucagucccccacaagcaaucauucuccuaccuccugucccccgaucugcccuggauaccgguggaugugccuccgcagauucauuaucuuucuguucauccuucugcucugucugauuuuucuucugguccuccuggauuaccagggcaugcugcccgugugcccucucauccccgggagcacgaccacaaacaccggacccuguaaaacaugcaccacgccugcucaaggcaauuccauguucccgucuuguugcuguacaaagcccaccgacgggaacugcacaugcauuccuauccccagcuccugggccuuugcuaaauaucugugggagugggccagcguucgguucucuuggcuuucccugcucgugccuuucguccagugguuugugggacugagccccaccguguggcuuucugcgauuuggaugaugugguacuggggcccuagccuguauuccaucgucucuccguucauuccccuccugccuaucuuuuucugucuguggguuuacaucugaggacuagucccuguucccagagcccacuuuuuuuucuuuuuuugaaauaaaauagccugucuuucagaucucaaaggcucuuuucagagccaccaaaaaaaaaaaaaaaaaaaaaaaaaaaaaaaaaaaaaaaaaaaaaaaaaaaaaaaaaaaaaaaaaaaaaaaaaaaaaaaaaaaaaaaaaaaaaaaaaaaaagaauu

SEQ ID NO: 9536 - RNA, 1903 nt, Artificial Sequence
  mRNA Design a-1 (hSL-A100-N5) comprising derived and/or modified sequence from Pf(3D7)__XP_001351122.1__HsALB_Pf-CSP(19-272)_L(AAY)_Pf-CSP(346-3 65)_L(AAY)_PADRE_L(PVTN)_HBsAg (opt5)
aggagagucccgcagucggcguccagcggcucugcuuguucgugugugugucguugcaggccuuauucaagcuuaccaugaagugggugaccuucaucagccugcucuuucuguucuccucugccuacagccuuuuucaggaguaucaaugcuacggcuccucuagcaacacaagaguccugaaugaacucaacuaugacaaugcugggacgaaccuguacaaugagcuugaaaugaacuauuacggaaaacaggagaauugguauucccugaagaaaaacucucggagccucggcgaaaaugaugacgggaacaaugaggauaacgagaagcugcgcaaacccaagcacaagaaacugaagcagccugccgacggaaauccggaucccaacgcgaauccuaacguugaccccaacgcuaauccuaacguggaucccaaugccaacccuaauguggacccgaacgccaaucccaacgcuaauccuaacgccaaucccaacgcuaauccuaacgccaaucccaacgcgaacccgaaugccaacccuaaugcuaaccccaaugccaacccuaaugcuaaccccaaugccaaccccaaugcgaacccuaaugccaacccgaaugcuaaccccaacgccaauccuaacgcuaaucccaacgccaauccuaacgucgaucccaaugccaacccgaaugcuaacccuaaugcgaaccccaaugccaacccuaaugcuaaccccaacgccaauccuaacgccaaucccaacgcuaauccgaacgccaauccuaacgcgaaucccaacgcuaaucccaacgccaauccuaacgccaauccgaacgcuaaucccaacgccaacccuaaugcuaaccccaaugccaacccuaaugcgaaccccgccgcuuacauuaaaccuggcuccgccaauaagcccaaagacgaacucgauuacgcuaacgacaucgaggccgcguaugccaaguucguggcugccuggacccugaaggcugccgccccgguuacaaauauggaaaacauuaccagcggguuucuuggaccucugcucgugcugcaggcuggcuucuuucuucugacaagaauccucaccauuccccaaucucuggauuccugguggacaagccugaauuuccucggcgggucuccugucugucugggacagaacucccagagccccaccucuaaucauuccccgacgagcugcccucccaucuguccuggcuaccgguggaugugccuucgcagauuuaucauuuuccuguuuauccuccugcuuugucugauuuuccuccuggugcugcucgacuaucaggggaugcugcccguuugcccccuuaucccuggauccaccacaaccaacacaggcccguguaaaaccugcacgacacccgcgcaaggaaauucuauguuuccuagcuguugcuguaccaagcccacagacgggaacuguaccugcauuccuauccccuccagcugggccuucgcuaaauaccugugggagugggccucugugcgguucuccuggcucagccugcuugucccuuuugugcagugguucgugggccugucuccgaccgucuggcucagcgccauuuggaugaugugguauuggggccccucccuguacucuaucguuagcccuuuuaucccccugcucccuauuuucuuuugccuguggguguauaucugaggacuagucccuguucccagagcccacuuuuuuuucuuuuuuugaaauaaaauagccugucuuucagaucucaaaggcucuuuucagagccaccaaaaaaaaaaaaaaaaaaaaaaaaaaaaaaaaaaaaaaaaaaaaaaaaaaaaaaaaaaaaaaaaaaaaaaaaaaaaaaaaaaaaaaaaaaaaaaaaaaaaagaauu

SEQ ID NO: 9537 - RNA, 2122 nt, Artificial Sequence
  mRNA Design a-1 (hSL-A100-N5) comprising derived and/or modified sequence from Pf(3D7)__XP_001351122.1__HsALB_Pf-CSP(19-384)_L(PVTN)_HBsAg (opt5)
aggagagucccgcagucggcguccagcggcucugcuuguucgugugugugucguugcaggccuuauucaagcuuaccaugaagugggugaccuucaucagccugcucuuucuguucuccucugccuacagccuuuuucaggaguaucaaugcuacggcuccucuagcaacacaagaguccugaaugaacucaacuaugacaaugcugggacgaaccuguacaaugagcuugaaaugaacuauuacggaaaacaggagaauugguauucccugaagaaaaacucucggagccucggcgaaaaugaugacgggaacaaugaggauaacgagaagcugcgcaaacccaagcacaagaaacugaagcagccugccgacggaaauccggaucccaacgcgaauccuaacguugaccccaacgcuaauccuaacguggaucccaaugccaacccuaauguggacccgaacgccaaucccaacgcuaauccuaacgccaaucccaacgcuaauccuaacgccaaucccaacgcgaacccgaaugccaacccuaaugcuaaccccaaugccaacccuaaugcuaaccccaaugccaaccccaaugcgaacccuaaugccaacccgaaugcuaaccccaacgccaauccuaacgcuaaucccaacgccaauccuaacgucgaucccaaugccaacccgaaugcuaacccuaaugcgaaccccaaugccaacccuaaugcuaaccccaacgccaauccuaacgccaaucccaacgcuaauccgaacgccaauccuaacgcgaaucccaacgcuaaucccaacgccaauccuaacgccaauccgaacgcuaaucccaacgccaacccuaaugcuaaccccaaugccaacccuaaugcgaaccccaauaaaaacaaucagggcaacgggcaaggacauaauaugccuaacgaccccaauagaaacguggaugaaaaugccaacgcuaacuccgccguuaagaauaacaauaacgaggaaccgagcgacaaacacauuaaggaguaccucaauaagauccagaacucucuguccaccgaguggagcccuuguucugugacaugcggcaauggcauucagguccggaucaaacccggguccgcuaacaagccuaaagaugaacuugacuacgccaaugacauugagaagaaaaucuguaagauggaaaaaugcagcucuguguucaacguugucaauuccagccccgugaccaacauggagaauaucacauccggauuucugggcccgcuccuggugcuucaggcgggguucuuucugcucacccgcauucugacaaucccucaaucucuggauagcugguggaccucccucaacuuccugggaggcagccccgugugucuugggcaaaauucucaguccccuacgagcaaccauucucccaccagcugucccccuauuugcccgggauauagauggaugugccugcggcgcuuuaucauuuuccucuuuauccugcuucugugucucauuuuccugcugguccuccuggacuaccagggcaugcuucccguuugcccucugauccccggcuccacaaccacaaacaccgggccuuguaagacgugcacaacccccgcccagggaaauucuauguuuccuagcugcuguugcacaaagccgaccgauggcaacuguaccugcauccccauuccuuccagcugggcuuucgccaaauaucucugggaaugggcuucugugagauucuccuggcugagccuucuggugcccuuuguccagugguucguggggcucucuccuacaguuuggcuguccgccaucuggaugaugugguacuggggacccagccuguauuccauugugucuccguuuaucccucuccugcccauuuucuuuugucuuugggucuacaucugaggacuagucccuguucccagagcccacuuuuuuuucuuuuuuugaaauaaaauagccugucuuucagaucucaaaggcucuuuucagagccaccaaaaaaaaaaaaaaaaaaaaaaaaaaaaaaaaaaaaaaaaaaaaaaaaaaaaaaaaaaaaaaaaaaaaaaaaaaaaaaaaaaaaaaaaaaaaaaaaaaaaagaauu

SEQ ID NO: 9538 - RNA, 1939 nt, Artificial Sequence
  mRNA Design a-1 (hSL-A100-N5) comprising derived and/or modified sequence from Pf(3D7)__XP_001351122.1__HsALB_Pf-CSP(19-384)_L(SGG)_Ferritin (opt5)
aggagagucccgcagucggcguccagcggcucugcuuguucgugugugugucguugcaggccuuauucaagcuuaccaugaagugggugaccuucaucagccugcucuuucuguucuccucugccuacagccuuuuucaggaguaucaaugcuacggcuccucuagcaacacaagagugcugaaugaacucaacuaugacaaugcugggacgaaccuguacaaugagcuugaaaugaacuauuacggaaaacaggagaauugguauucccugaagaaaaacucucggagccucggcgaaaaugaugacgggaacaaugaggauaacgagaagcugcgcaaacccaagcacaagaaacugaagcagccugccgacggaaauccggaucccaacgcgaauccuaacguugaccccaacgcuaauccuaacguggaucccaaugccaacccuaauguggacccgaacgccaaucccaacgcuaauccuaacgccaaucccaacgcuaauccuaacgccaaucccaacgcgaacccgaaugccaacccuaaugcuaaccccaaugccaacccuaaugcuaaccccaaugccaaccccaaugcgaacccuaaugccaacccgaaugcuaaccccaacgccaauccuaacgcuaaucccaacgccaauccuaacgucgaucccaaugccaacccgaaugcuaacccuaaugcgaaccccaaugccaacccuaaugcuaaccccaacgccaauccuaacgccaaucccaacgcuaauccgaacgccaauccuaacgcgaaucccaacgcuaaucccaacgccaauccuaacgccaauccgaacgcuaaucccaacgccaacccuaaugcuaaccccaaugccaacccuaaugcgaaccccaauaaaaacaaucagggcaacgggcaaggacauaauaugccuaacgaccccaauagaaacguggaugaaaaugccaacgcuaacuccgccguuaagaauaacaauaacgaggaaccgagcgacaaacacauuaaggaguaccucaauaagauccagaacucucuguccaccgaguggagcccuuguucugugacaugcggcaauggcauucagguccggaucaaacccggguccgcuaacaagccuaaagaugaacuugacuacgccaaugacauugagaagaaaaucuguaagauggaaaaaugcagcucuguguucaacguugugaacuccagcuccggaggccugucuaaggauaucauuaagcuccugaaugagcaggucaauaaagaaaugaacagcuccaaucuuuauaugagcaugucuuccugguguuacacccauagccuggacggggcgggacucuuucuguucgaucacgccgcugaggaguaugaacaugccaagaaacugaucauuuuucucaacgagaacaaugugcccgugcaacugacaucuaucagcgcuccggaacacaaguucgagggccuuacccagauuuuucagaaagccuacgaacacgagcagcauaucuccgagucuauuaacaauaucgucgaccacgccaucaagagcaaggaucaugcuacauucaacuuucugcaaugguauguugcggaacagcacgaggaagagguccucuucaaagacauucuggauaagaucgaacuuauugggaaugagaaccacggacuguaccucgccgaccaguaugugaaaggcaucgcuaagucccgcaaaagcugaggacuagucccuguucccagagcccacuuuuuuuucuuuuuuugaaauaaaauagccugucuuucagaucucaaaggcucuuuucagagccaccaaaaaaaaaaaaaaaaaaaaaaaaaaaaaaaaaaaaaaaaaaaaaaaaaaaaaaaaaaaaaaaaaaaaaaaaaaaaaaaaaaaaaaaaaaaaaaaaaaaaagaauu

SEQ ID NO: 9539 - RNA, 1900 nt, Artificial Sequence
  mRNA Design a-1 (hSL-A100-N5) comprising derived and/or modified sequence from Pf(3D7)__XP_001351122.1__HsALB_Pf-CSP(93-384)_L(PVTN)_HBsAg (opt5)
aggagagucccgcagucggcguccagcggcucugcuuguucgugugugugucguugcaggccuuauucaagcuuaccaugaagugggugaccuucaucagccugcucuuucuguucuccucugccuacagcaaacuuaagcagcccgcugacggcaacccugauccgaaugccaaccccaaugucgacccuaacgcgaaucccaacguugauccuaaugcuaaccccaauguggacccuaacgccaauccgaacgccaaucccaacgcuaauccuaacgccaaccccaaugcuaacccuaaugccaaccccaaugcgaacccgaaugccaacccuaaugcuaaccccaaugccaacccuaaugcuaaccccaaugccaaccccaacgcgaauccuaacgccaauccgaacgcuaaucccaacgccaauccuaacgcuaaucccaacguggauccuaaugccaaccccaaugccaacccgaaugcuaacccuaacgcgaaucccaacgccaauccuaacgcuaaucccaacgccaauccuaacgccaaucccaacgcuaauccgaacgccaauccuaacgcgaaucccaacgcuaaccccaaugccaacccuaaugccaacccgaaugcuaaccccaaugccaacccuaaugcuaaccccaaugccaacccuaauaaaaacaaucaagggaacggacagggccacaauaugcccaacgacccuaacagaaaugucgaugagaacgcgaaugccaacuccgcugugaagaauaacaauaacgaggaacccucugacaaacauauuaaggaauaucugaauaagauccagaacagccucuccacagaguggucuccgugcagcguuacgugugggaaugggauucaggugcggaucaaaccuggcuccgccaacaagcccaaagaugaacuggacuacgcuaaugauauugagaagaaaaucugcaagauggagaaguguagcucugucuuuaacgugguuaauuccagcccugugaccaacauggaaaacaucacaucuggguuccuuggaccccugcucguccugcaagccggcuuuuuccugcucacccgcauucugacaaucccgcagucccuugacagcugguggaccucucugaauuuucucggcggguccccugugugccugggacagaacagccagucccccacaucuaaucacagcccuaccuccuguccucccauuugccccggcuauagauggaugugucuucggcgcuucaucauuuuucuguucauccuccugcugugccucauuuuucugcuugugcugcucgauuaccaagggaugcugccggucuguccccuuaucccuggaagcacgaccacaaacaccggccccugcaaaacauguaccacgccugcgcagggaaauucuauguuccccuccugcugcuguacaaagccuaccgacggaaacugcacauguaucccgauucccagcucuugggccuuugcuaaauaucugugggagugggccagcguuagauucuccuggcucucucugcuggugccuuucgugcagugguuugucggccucagccccaccguguggcuguccgcuaucuggaugaugugguacuggggcccuagccuuuauucuauuguuucccccuucaucccgcugcucccuaucuuuuucugccuguggguguacauuugaggacuagucccuguucccagagcccacuuuuuuuucuuuuuuugaaauaaaauagccugucuuucagaucucaaaggcucuuuucagagccaccaaaaaaaaaaaaaaaaaaaaaaaaaaaaaaaaaaaaaaaaaaaaaaaaaaaaaaaaaaaaaaaaaaaaaaaaaaaaaaaaaaaaaaaaaaaaaaaaaaaaagaauu

SEQ ID NO: 9540 - RNA, 1561 nt, Artificial Sequence; identical to SEQ ID NO: 7466
  mRNA Design a-1 (hSL-A100-N5) comprising derived and/or modified sequence from Pf(3D7)__XP_001351122.1__HsALB_Pf-CSP(199-377)_L(PVTN)_HBsAg (opt5)

SEQ ID NO: 9541 - RNA, 1258 nt, Artificial Sequence
  mRNA Design a-1 (hSL-A100-N5) comprising derived and/or modified sequence from Pf(3D7)__XP_001351122.1__HsALB_Pf-CSP(19-272)_L(AAY)_Pf-CSP(346-3 75)_L(AAY)_Pf-CSP(310-327) (opt5)
aggagagucccgcagucggcguccagcggcucugcuuguucgugugugugucguugcaggccuuauucaagcuuaccaugaagugggugaccuucaucagccugcucuuucuguucuccucugccuacagccuuuuucaggaguaucaaugcuacggcuccucuagcaacacaagaguccugaaugaacucaacuaugacaaugcugggacgaaccuguacaaugagcuugaaaugaacuauuacggaaaacaggagaauugguauucccugaagaaaaacucucggagccucggcgaaaaugaugacgggaacaaugaggauaacgagaagcugcgcaaacccaagcacaagaaacugaagcagccugccgacggaaauccggaucccaacgcgaauccuaacguugaccccaacgcuaauccuaacguggaucccaaugccaacccuaauguggacccgaacgccaaucccaacgcuaauccuaacgccaaucccaacgcuaauccuaacgccaaucccaacgcgaacccgaaugccaacccuaaugcuaaccccaaugccaacccuaaugcuaaccccaaugccaaccccaaugcgaacccuaaugccaacccgaaugcuaaccccaacgccaauccuaacgcuaaucccaacgccaauccuaacgucgaucccaaugccaacccgaaugcuaacccuaaugcgaaccccaaugccaacccuaaugcuaaccccaacgccaauccuaacgccaaucccaacgcuaauccgaacgccaauccuaacgcgaaucccaacgcuaaucccaacgccaauccuaacgccaauccgaacgcuaaucccaacgccaacccuaaugcuaaccccaaugccaacccuaaugcgaaccccgccgcuuacauuaaaccuggcuccgccaauaagcccaaagacgaacucgauuacgcuaacgacaucgagaagaagauuuguaaaauggaaaagugcagcgccgcguaugagccgucugauaaacauaucaaggaguaccugaauaaaauucagaacucccuuugaggacuagucccuguucccagagcccacuuuuuuuucuuuuuuugaaauaaaauagccugucuuucagaucucaaaggcucuuuucagagccaccaaaaaaaaaaaaaaaaaaaaaaaaaaaaaaaaaaaaaaaaaaaaaaaaaaaaaaaaaaaaaaaaaaaaaaaaaaaaaaaaaaaaaaaaaaaaaaaaaaaaagaauu

SEQ ID NO: 9542 - RNA, 1306 nt, Artificial Sequence
  mRNA Design a-1 (hSL-A100-N5) comprising derived and/or modified sequence from Pf(3D7)__XP_001351122.1__HsALB_Pf-CSP(19-272)_L(AAY)_Pf-CSP(346-3 75)_L(AAY)_Pf-CSP(310-327)_L(AAY)_PADRE (opt5)
aggagagucccgcagucggcguccagcggcucugcuuguucgugugugugucguugcaggccuuauucaagcuuaccaugaagugggugaccuucaucagccugcucuuucuguucuccucugccuacagccuuuuucaggaguaucaaugcuacggcuccucuagcaacacaagaguccugaaugaacucaacuaugacaaugcugggacgaaccuguacaaugagcuugaaaugaacuauuacggaaaacaggagaauugguauucccugaagaaaaacucucggagccucggcgaaaaugaugacgggaacaaugaggauaacgagaagcugcgcaaacccaagcacaagaaacugaagcagccugccgacggaaauccggaucccaacgcgaauccuaacguugaccccaacgcuaauccuaacguggaucccaaugccaacccuaauguggacccgaacgccaaucccaacgcuaauccuaacgccaaucccaacgcuaauccuaacgccaaucccaacgcgaacccgaaugccaacccuaaugcuaaccccaaugccaacccuaaugcuaaccccaaugccaaccccaaugcgaacccuaaugccaacccgaaugcuaaccccaacgccaauccuaacgcuaaucccaacgccaauccuaacgucgaucccaaugccaacccgaaugcuaacccuaaugcgaaccccaaugccaacccuaaugcuaaccccaacgccaauccuaacgccaaucccaacgcuaauccgaacgccaauccuaacgcgaaucccaacgcuaaucccaacgccaauccuaacgccaauccgaacgcuaaucccaacgccaacccuaaugcuaaccccaaugccaacccuaaugcgaaccccgccgcuuacauuaaaccuggcuccgccaauaagcccaaagacgaacucgauuacgcuaacgacaucgagaagaagauuuguaaaauggaaaagugcagcgccgcguaugagccgucugauaaacauaucaaggaguaccugaauaaaauucagaacucccuugccgcuuaugccaaguucguggcugccuggacccugaaagccgcugcgugaggacuagucccuguucccagagcccacuuuuuuuucuuuuuuugaaauaaaauagccugucuuucagaucucaaaggcucuuuucagagccaccaaaaaaaaaaaaaaaaaaaaaaaaaaaaaaaaaaaaaaaaaaaaaaaaaaaaaaaaaaaaaaaaaaaaaaaaaaaaaaaaaaaaaaaaaaaaaaaaaaaaagaauu

SEQ ID NO: 9543 - RNA, 1306 nt, Artificial Sequence
  mRNA Design a-1 (hSL-A100-N5) comprising derived and/or modified sequence from Pf(3D7)__XP_001351122.1__HsALB_Pf-CSP(19-272)_L(AAY)_Pf-CSP(310-3 27)_L(AAY)_Pf-CSP(346-375)_L(AAY)_PADRE (opt5)
aggagagucccgcagucggcguccagcggcucugcuuguucgugugugugucguugcaggccuuauucaagcuuaccaugaagugggugaccuucaucagccugcucuuucuguucuccucugccuacagccuuuuucaggaguaucaaugcuacggcuccucuagcaacacaagaguccugaaugaacucaacuaugacaaugcugggacgaaccuguacaaugagcuugaaaugaacuauuacggaaaacaggagaauugguauucccugaagaaaaacucucggagccucggcgaaaaugaugacgggaacaaugaggauaacgagaagcugcgcaaacccaagcacaagaaacugaagcagccugccgacggaaauccggaucccaacgcgaauccuaacguugaccccaacgcuaauccuaacguggaucccaaugccaacccuaauguggacccgaacgccaaucccaacgcuaauccuaacgccaaucccaacgcuaauccuaacgccaaucccaacgcgaacccgaaugccaacccuaaugcuaaccccaaugccaacccuaaugcuaaccccaaugccaaccccaaugcgaacccuaaugccaacccgaaugcuaaccccaacgccaauccuaacgcuaaucccaacgccaauccuaacgucgaucccaaugccaacccgaaugcuaacccuaaugcgaaccccaaugccaacccuaaugcuaaccccaacgccaauccuaacgccaaucccaacgcuaauccgaacgccaauccuaacgcgaaucccaacgcuaaucccaacgccaauccuaacgccaauccgaacgcuaaucccaacgccaacccuaaugcuaaccccaaugccaacccuaaugcgaaccccgccgcuuacgaaccuuccgacaaacauauuaaggaguaccucaauaaaauccagaacagccuggccgcuuauauuaagcccggcucugccaauaagccgaaagaugaacuugacuacgcgaacgauaucgagaagaaaauuuguaagauggagaaaugcuccgccgcuuaugccaaguucguggcugccuggacccugaaagccgcugcgugaggacuagucccuguucccagagcccacuuuuuuuucuuuuuuugaaauaaaauagccugucuuucagaucucaaaggcucuuuucagagccaccaaaaaaaaaaaaaaaaaaaaaaaaaaaaaaaaaaaaaaaaaaaaaaaaaaaaaaaaaaaaaaaaaaaaaaaaaaaaaaaaaaaaaaaaaaaaaaaaaaaaagaauu

SEQ ID NO: 9544 - RNA, 1360 nt, Artificial Sequence
  mRNA Design a-1 (hSL-A100-N5) comprising derived and/or modified sequence from Pf(3D7)__XP_001351122.1__HsALB_Pf-CSP(19-272)_L(AAY)_Pf-CSP(310-3 27)_L(AAY)_Pf-CSP(346-375)_L(AAY)_PADRE_L(AAY)_P2 (opt5)
aggagagucccgcagucggcguccagcggcucugcuuguucgugugugugucguugcaggccuuauucaagcuuaccaugaagugggugaccuucaucagccugcucuuucuguucuccucugccuacagccuuuuucaggaguaucaaugcuacggcuccucuagcaacacaagaguccugaaugaacucaacuaugacaaugcugggacgaaccuguacaaugagcuugaaaugaacuauuacggaaaacaggagaauugguauucccugaagaaaaacucucggagccucggcgaaaaugaugacgggaacaaugaggauaacgagaagcugcgcaaacccaagcacaagaaacugaagcagccugccgacggaaauccggaucccaacgcgaauccuaacguugaccccaacgcuaauccuaacguggaucccaaugccaacccuaauguggacccgaacgccaaucccaacgcuaauccuaacgccaaucccaacgcuaauccuaacgccaaucccaacgcgaacccgaaugccaacccuaaugcuaaccccaaugccaacccuaaugcuaaccccaaugccaaccccaaugcgaacccuaaugccaacccgaaugcuaaccccaacgccaauccuaacgcuaaucccaacgccaauccuaacgucgaucccaaugccaacccgaaugcuaacccuaaugcgaaccccaaugccaacccuaaugcuaaccccaacgccaauccuaacgccaaucccaacgcuaauccgaacgccaauccuaacgcgaaucccaacgcuaaucccaacgccaauccuaacgccaauccgaacgcuaaucccaacgccaacccuaaugcuaaccccaaugccaacccuaaugcgaaccccgccgcuuacgaaccuuccgacaaacauauuaaggaguaccucaauaaaauccagaacagccuggccgcuuauauuaagcccggcucugccaauaagccgaaagaugaacuugacuacgcgaacgauaucgagaagaaaauuuguaagauggagaaaugcuccgccgcuuaugccaaguucguggcugccuggacccugaaagccgcugcggccgcuuaccaauauaucaaggccaauagcaaguuuaucgggauuacagaacucugaggacuagucccuguucccagagcccacuuuuuuuucuuuuuuugaaauaaaauagccugucuuucagaucucaaaggcucuuuucagagccaccaaaaaaaaaaaaaaaaaaaaaaaaaaaaaaaaaaaaaaaaaaaaaaaaaaaaaaaaaaaaaaaaaaaaaaaaaaaaaaaaaaaaaaaaaaaaaaaaaaaaagaauu

SEQ ID NO: 9545 - RNA, 1324 nt, Artificial Sequence
  mRNA Design a-1 (hSL-A100-N5) comprising derived and/or modified sequence from Pf(3D7)__XP_001351122.1__HsALB_Pf-CSP(19-272)_L(AAY)_Pf-CSP(310-3 27)_Linker (AAY)_Pf-CSP(346-397) (opt5)
aggagagucccgcagucggcguccagcggcucugcuuguucgugugugugucguugcaggccuuauucaagcuuaccaugaagugggugaccuucaucagccugcucuuucuguucuccucugccuacagccuuuuucaggaguaucaaugcuacggcuccucuagcaacacaagaguccugaaugaacucaacuaugacaaugcugggacgaaccuguacaaugagcuugaaaugaacuauuacggaaaacaggagaauugguauucccugaagaaaaacucucggagccucggcgaaaaugaugacgggaacaaugaggauaacgagaagcugcgcaaacccaagcacaagaaacugaagcagccugccgacggaaauccggaucccaacgcgaauccuaacguugaccccaacgcuaauccuaacguggaucccaaugccaacccuaauguggacccgaacgccaaucccaacgcuaauccuaacgccaaucccaacgcuaauccuaacgccaaucccaacgcgaacccgaaugccaacccuaaugcuaaccccaaugccaacccuaaugcuaaccccaaugccaaccccaaugcgaacccuaaugccaacccgaaugcuaaccccaacgccaauccuaacgcuaaucccaacgccaauccuaacgucgaucccaaugccaacccgaaugcuaacccuaaugcgaaccccaaugccaacccuaaugcuaaccccaacgccaauccuaacgccaaucccaacgcuaauccgaacgccaauccuaacgcgaaucccaacgcuaaucccaacgccaauccuaacgccaauccgaacgcuaaucccaacgccaacccuaaugcuaaccccaaugccaacccuaaugcgaaccccgccgcuuacgaaccuuccgacaaacauauuaaggaguaccucaauaaaauccagaacagccuggccgcuuauauuaagcccggcucugccaauaagccgaaagaugaacuugacuacgcgaacgauaucgagaagaaaauuuguaagauggagaaaugcuccagcguguucaauguugugaacucuuccaucgggcugaucaugguccucagcuuucuguuccuuaauugaggacuagucccuguucccagagcccacuuuuuuuucuuuuuuugaaauaaaauagccugucuuucagaucucaaaggcucuuuucagagccaccaaaaaaaaaaaaaaaaaaaaaaaaaaaaaaaaaaaaaaaaaaaaaaaaaaaaaaaaaaaaaaaaaaaaaaaaaaaaaaaaaaaaaaaaaaaaaaaaaaaaagaauu

SEQ ID NO: 9546 - RNA, 1924 nt, Artificial Sequence
  mRNA Design a-1 (hSL-A100-N5) comprising derived and/or modified sequence from Pf(3D7)__XP_001351122.1__LumSynt_L(GGS4-GGG)_Pf-CSP(19-397) (opt6)
aggagagucccgcagucggcguccagcggcucugcuuguucgugugugugucguugcaggccuuauucaagcuuaccaugcaaauauacgaaggaaaacuaacagcagaaggauuacgauucggcauaguagcaucaagguucaaccacgcauuaguagauagacuaguagaaggagcaauagacgcaauaguccgacauggaggacgagaagaagauauaacacuagucagaguaccagggagcugggaaaucccaguagcagcaggagaacucgcaagaaaagaagauaucgacgccguaaucgcaaucgggguacuaauaagaggcgcaacaccccauuucgacuacauagcaagcgaaguaucaaaaggauuagcagaccuaaguuuagaacuaagaaaaccuauuacauucggcgucauaacggcagacacauuagaacaagccaucgaaagagcaggaacaaaacacggaaacaaaggcugggaagcagcacuaagcgcaauugaaauggcaaauuuauucaaaucccuaagaggcggcucagguggcaguggaggaucaggaggaucaggaggaggccuauuccaagaauaucaaugcuacggaucgagcucgaauacacgcguauuaaacgaauuaaacuacgacaacgcaggaacaaaccuauacaacgaacuagaaaugaacuauuauggaaaacaagagaacugguacucccuaaaaaaaaacagucgaagcuuaggagaaaaugacgacggaaauaacgaagacaacgaaaaacuaagaaaacccaaacauaaaaaauuaaaacaacccgcugacggaaacccagacccaaacgcuaacccgaacguugauccaaaugcaaacccaaauguggauccaaaugcaaaccccaacguagauccaaaugcaaacccaaacgcaaaccccaaugccaacccaaacgccaacccuaaugcuaauccaaacgcaaacccaaacgcaaacccgaacgcaaauccaaacgcaaacccuaaugcuaacccaaaugcaaauccaaacgcaaacccaaacgcuaacccaaacgcaaacccaaaugcaaacccaaaugcaaacccaaacgcaaauccaaacguagacccaaacgcaaauccaaacgcaaauccaaacgcaaacccaaacgccaaccccaaugcaaauccgaacgcaaacccaaacgcaaacccaaacgcaaacccaaacgcaaacccaaaugccaacccaaacgcaaacccgaacgcaaacccaaacgcaaacccaaacgcaaacccuaaugcgaacccaaaugccaacccaaacgcaaaccccaacgcuaacccaaacaaaaacaaucaaggaaacggacaagggcacaacaugccaaacgauccaaacagaaaugucgacgaaaacgccaaugcaaacagugccguaaaaaauaauaacaacgaagaaccuucagacaaacacauaaaagaauacuuaaacaaaauacaaaacucauuaucaaccgaauggagcccauguucuguuacaugcggaaauggaauacaaguaagaauaaaaccaggaucagcaaacaaaccaaaagacgaauuagacuacgcaaaugauauagaaaaaaaaauaugcaagauggaaaaaugcaguucuguauuuaacguaguaaacagcucaauaggucuaauaaugguacuauccuuucuuuuccugaacuaaggacuagucccuguucccagagcccacuuuuuuuucuuuuuuugaaauaaaauagccugucuuucagaucucaaaggcucuuuucagagccaccaaaaaaaaaaaaaaaaaaaaaaaaaaaaaaaaaaaaaaaaaaaaaaaaaaaaaaaaaaaaaaaaaaaaaaaaaaaaaaaaaaaaaaaaaaaaaaaaaaaaagaauu

SEQ ID NO: 9547 - RNA, 1786 nt, Artificial Sequence
  mRNA Design a-1 (hSL-A100-N5) comprising derived and/or modified sequence from Pf(3D7)__XP_001351122.1__HsALB_Pf-CSP(19-272)_L(PVTN)_HBsAg (opt6)
aggagagucccgcagucggcguccagcggcucugcuuguucgugugugugucguugcaggccuuauucaagcuuaccaugaaauggguaaccuucaucucacuauuauucuuauuuucaucugcauacucacucuuccaagaauaccaaugcuacgguucaucuucuaacacaagaguacuaaacgaacuaaacuacgacaacgcaggaacaaaccucuauaacgaacuugaaaugaacuacuauggaaaacaagaaaacugguauucccuaaaaaaaaacucaagauccuuaggagaaaacgacgacggaaauaacgaagacaacgaaaaacuaagaaaaccaaaacacaaaaaacuaaaacaacccgcagacggaaacccagacccaaacgcaaacccaaacguagacccaaacgcaaacccaaacgucgacccaaacgccaauccaaacguagacccaaacgcuaacccaaacgccaauccaaacgcaaauccaaaugccaacccaaacgcaaacccaaaugcgaauccaaaugcaaaccccaaugcaaacccaaacgcaaauccaaacgcaaacccaaacgcaaacccuaacgcaaauccaaaugcaaacccuaacgcaaacccaaacgcaaauccaaacgcaaacccaaaugcaaauccaaacgucgacccaaacgcaaacccgaacgcaaacccaaacgcaaacccaaaugcaaauccaaaugcaaaccccaaugcaaacccaaacgcaaacccaaacgcuaacccaaaugcaaacccaaacgcaaacccaaacgcaaauccaaacgcaaacccaaacgcaaacccaaaugcaaacccaaacgcaaaccccaaugcaaauccaaacgcaaacccaaacgcaaacccacccguaaccaacauggaaaacaucacaucaggauuccuuggaccccucuuaguacuucaagcaggauucuuccuauuaacaagaauacuaacaauaccucaaucuuuagauucaugguggacuucauuaaauuuccuaggaggaagcccaguaugcuuaggacaaaacagccaaucaccaaccucaaaccacucaccaaccucaugcccaccaauaugcccaggauaccgauggaugugccuaagaagauucauaauauucuuauucauacuacuacuaugccucauauucuuacuaguacuauuagacuaccaaggaaugcugccagucugcccacuuauaccagguagcaccaccacuaacacaggaccuugcaaaacaugcacaacacccgcucaaggaaauucuauguuuccaucaugcugcugcacuaaacccacagauggcaauuguacaugcauaccaauccccucaucaugggcauuugccaaauacuuaugggaaugggcaucuguaagauucucuuggcuaucacucuuaguaccauucguacaaugguucguaggccuauccccuacaguauggcuauccgcaauauggaugaugugguacuggggaccaucacuauacucaauagucucacccuucauaccacuauuaccaauauucuucugccuauggguauauauauaaggacuagucccuguucccagagcccacuuuuuuuucuuuuuuugaaauaaaauagccugucuuucagaucucaaaggcucuuuucagagccaccaaaaaaaaaaaaaaaaaaaaaaaaaaaaaaaaaaaaaaaaaaaaaaaaaaaaaaaaaaaaaaaaaaaaaaaaaaaaaaaaaaaaaaaaaaaaaaaaaaaaagaauu

SEQ ID NO: 9548 - RNA, 1903 nt, Artificial Sequence
  mRNA Design a-1 (hSL-A100-N5) comprising derived and/or modified sequence from Pf(3D7)__XP_001351122.1__HsALB_Pf-CSP(19-272)_L(AAY)_Pf-CSP(346-3 65)_L(AAY)_PADRE_L(PVTN)_HBsAg (opt6)
aggagagucccgcagucggcguccagcggcucugcuuguucgugugugugucguugcaggccuuauucaagcuuaccaugaaaugggucaccuucauuuccuuauuauucuuauuuucguccgcauacucacuauuucaagaauaucaauguuacggaucaagcucaaacacccgcguacucaacgaacuaaacuacgacaacgcaggaacaaaccuauauaacgaacuagaaaugaauuauuacggaaaacaagaaaacugguauucacuuaaaaaaaacuccagaucccuuggcgaaaacgacgacggaaauaaugaagacaacgaaaaacuuagaaaaccaaaacauaaaaaacuaaaacaaccugcagacgguaacccagauccaaaugcuaacccaaauguagacccuaacgcuaacccaaacguagauccaaacgccaacccaaacguagauccaaacgcaaacccaaacgcaaauccaaaugcaaacccaaacgccaaccccaacgcaaacccaaaugcaaauccuaaugcaaaucccaacgcaaauccaaacgcaaauccaaaugcaaaccccaacgcaaacccaaaugcaaauccaaaugcaaauccaaaugcaaacccaaacgcaaacccaaaugcaaauccuaacgcaaacccaaacgucgaccccaacgcaaauccaaacgcaaacccaaacgcaaaccccaaugcaaacccaaaugcaaacccaaacgcaaacccaaacgcaaaccccaacgcaaauccaaacgcaaauccaaaugcaaauccaaacgcaaaccccaaugcaaaccccaaugcuaacccaaacgccaaucccaacgcaaacccaaacgcaaaucccaacgcaaauccaaacgcaaacccugcagcauacauaaaacccggcucugcuaauaaacccaaagaugaacucgacuaugccaacgacauagaagcagccuacgcaaaauucguagcugcauggacauuaaaagcagcagcaccagugacaaacauggaaaacauuacaucaggauucuuagguccauuauuaguccuccaagcaggauucuucuuacuaacuagaauauuaacaauaccacaaucccuagacucuugguggacuucacuaaauuuccuaggaggauccccaguaugucucggucaaaauucucaaucaccuacaucaaaccauucaccaacaagcugccccccaaucugucccggauacagauggaugugccuacgcagauucauuauauuucuauucauacuacuucuaugccuaauauuccuacuaguccuucuagacuaccaaggaaugcuacccguaugcccacuuauaccaggauccacaacaacaaacacagguccaugcaaaacaugcacaacaccagcccaagguaauucuauguucccaucaugcuguugcacaaaaccaacagacgguaacugcacaugcaucccaauacccucaucaugggcauucgcaaaauaccuaugggaaugggcuucaguaagauucuccugguuaucccuuuuagucccauucguacaaugguucguaggauuaucacccacuguauggcuaucagcaauauggaugaugugguauuggggcccaucucuuuacucaaucgucuccccuuuuauuccacuacuacccauauuuuucugccuauggguauacauuuaaggacuagucccuguucccagagcccacuuuuuuuucuuuuuuugaaauaaaauagccugucuuucagaucucaaaggcucuuuucagagccaccaaaaaaaaaaaaaaaaaaaaaaaaaaaaaaaaaaaaaaaaaaaaaaaaaaaaaaaaaaaaaaaaaaaaaaaaaaaaaaaaaaaaaaaaaaaaaaaaaaaaagaauu

SEQ ID NO: 9549 - RNA, 2122 nt, Artificial Sequence
  mRNA Design a-1 (hSL-A100-N5) comprising derived and/or modified sequence from Pf(3D7)__XP_001351122.1__HsALB_Pf-CSP(19-384)_L(PVTN)_HBsAg (opt6)
aggagagucccgcagucggcguccagcggcucugcuuguucgugugugugucguugcaggccuuauucaagcuuaccaugaaauggguaaccuucauaucucucuuauuccuuuuuucaucugcauauucacuauuucaagaauaucaauguuauggaucaucaucaaacacccgaguacucaacgaauuaaauuacgacaacgcagguacuaacuuauacaacgaauuagaaaugaauuacuauggaaaacaagaaaacugguauucccucaaaaaaaacucucgaucucuaggcgaaaacgacgacggcaacaacgaagacaacgaaaaacuacguaaacccaaacacaaaaaacuaaaacaaccagcagauggaaacccagacccaaacgcaaacccaaacguagacccaaacgcaaauccaaacguagacccgaacgcaaauccaaauguagaucccaaugcuaauccaaaugccaacccaaacgcaaacccuaacgcuaaucccaacgcaaacccaaacgcaaacccaaaugcaaacccaaacgcaaaccccaacgcaaacccaaaugcaaauccaaaugcaaauccaaacgccaacccaaaugccaacccaaacgcaaauccaaacgcuaaccccaacgcaaaccccaacgccaaucccaacguagaccccaacgcaaacccaaaugcaaauccaaacgcaaaccccaaugcaaacccaaacgcuaacccuaaugcaaacccaaacgccaacccaaaugcaaaccccaacgccaacccaaacgcaaauccaaacgcaaacccaaacgcuaacccaaacgccaacccaaacgcaaacccaaacgcuaacccaaacgcaaacccaaaugcaaacccaaaugcuaauccaaauaaaaacaaccaaggaaacggccaaggacauaauaugccuaacgacccaaacagaaacguagacgaaaaugcaaacgcaaacuccgcaguaaaaaauaacaauaacgaagaacccuccgacaaacauauaaaagaauaucuaaacaaaauacaaaauucacucucuacugaaugguccccaugcucaguaacauguggaaacggaauccaaguacgcauaaaaccaggaucagcaaacaaaccaaaagacgaacuagacuacgcaaacgauauagaaaaaaaaauaugcaaaauggaaaaaugcuccuccguauucaacguagucaauucaucuccaguaaccaauauggaaaauauaaccuccggauuccuaggaccacuacucguuuuacaagcaggauucuucuuacuaacaagaauacucacuauaccacaaucccuggauucuugguggacaucccuaaauuucuuaggcggaucacccguaugccuaggccaaaauagccaaaguccaacuucaaaccacuccccaacuucuugcccaccaauaugccccggcuacagauggaugugccuucgacgauucauaauauuucuauucauacuauuacuaugucuaauauuccuacucguucuauuagacuaccaaggaauguuaccaguuugcccacuaauaccugguucaacaaccacuaacacuggucccugcaaaacauguaccaccccagcccaaggaaacucaauguuccccucaugcuguugcacaaaaccaaccgacggaaauugcacaugcauacccauaccaucuucuugggcauuugcuaaauaucuaugggaaugggcaucaguacgcuucucauggcuaucucuacuaguaccauucguccaaugguucguaggccuaucaccaacaguauggcuaucugcaauauggaugaugugguacuggggucccuccuuauauucaauuguaucaccuuuuaucccacuccuacccauauucuucuguuuauggguauacauauaaggacuagucccuguucccagagcccacuuuuuuuucuuuuuuugaaauaaaauagccugucuuucagaucucaaaggcucuuuucagagccaccaaaaaaaaaaaaaaaaaaaaaaaaaaaaaaaaaaaaaaaaaaaaaaaaaaaaaaaaaaaaaaaaaaaaaaaaaaaaaaaaaaaaaaaaaaaaaaaaaaaaagaauu

SEQ ID NO: 9550 - RNA, 1939 nt, Artificial Sequence
  mRNA Design a-1 (hSL-A100-N5) comprising derived and/or modified sequence from Pf(3D7)__XP_001351122.1__HsALB_Pf-CSP(19-384)_L(SGG)_Ferritin (opt6)
aggagagucccgcagucggcguccagcggcucugcuuguucgugugugugucguugcaggccuuauucaagcuuaccaugaaauggguaacauuuauaucucuauuauucuuauucuccucagcauacucacucuuucaagaauaccaaugcuacgguucuucauccaacacacgaguccuaaacgaauuaaacuacgacaaugcaggaaccaaucuauacaaugaacuugaaaugaacuacuacggaaaacaagaaaacugguacucccuaaaaaaaaacucacgaagccuaggagaaaaugacgacggaaacaacgaagacaacgaaaaacuacgaaaacccaaacacaaaaaacuaaaacaacccgccgacggcaauccagauccaaacgcaaacccaaacguagaccccaacgccaacccaaacguagauccaaacgcaaauccaaauguugauccaaaugcaaaccccaacgcaaacccaaacgcaaacccaaacgcaaacccaaacgcaaacccaaacgcaaauccaaaugcaaaucccaacgcaaauccaaacgcaaauccaaaugcaaacccaaacgcuaaucccaacgcuaacccaaacgcaaacccaaacgcaaacccgaacgcuaacccaaacgcaaacccaaacgcaaaccccaacguagacccaaacgcaaacccaaacgcaaaccccaacgcaaacccaaacgcaaacccaaacgcaaaccccaacgcaaaccccaacgcaaacccaaacgccaaccccaaugcaaacccaaacgccaacccaaacgcaaacccaaacgcaaacccaaacgcaaacccaaacgcaaauccaaacgcaaacccaaacgcaaacccaaacgcaaacccaaaugcaaacccaaacaaaaacaaccaaggaaauggacaaggacacaacaugccaaacgacccaaaccguaacguagaugaaaaugccaacgcaaacucagccguaaaaaacaacaacaacgaagaaccuucagacaaacacauaaaagaauacuuaaacaaaauacaaaacucauuaucaacugaauggucccccuguucagucacaugcggaaauggaauacaaguaagaauuaaaccagguucagccaacaaaccaaaagacgaacuagacuacgcaaacgacauugaaaaaaaaauauguaaaauggaaaaauguaguucagucuucaacguaguaaacucaucauccggaggauuauccaaagacauaauaaaacucuuaaaugaacaaguaaacaaagaaaugaacucgagcaaccucuauaugucaaugucauccuggugcuacacccauucccuagacggcgccggacuauuccuguucgaccaugcagcagaagaauaugaacacgcaaaaaagcuaaucaucuucuuaaacgaaaacaaugucccaguacaacuaaccuccauaucagcaccugaacauaaauucgaaggacuaacacaaauauuucaaaaagcauacgaacacgaacaacacauaucagaaucaauuaauaacauaguagaccacgcaaucaaaagcaaggaccacgcaacauucaacuuucuacaaugguacguagcagaacaacaugaagaagaaguacucuucaaagacaucuuagacaaaauugaacucauaggaaacgaaaaucacggacucuaccucgcagaccaguacguaaaaggaaucgcaaaaucacguaaaagcuaaggacuagucccuguucccagagcccacuuuuuuuucuuuuuuugaaauaaaauagccugucuuucagaucucaaaggcucuuuucagagccaccaaaaaaaaaaaaaaaaaaaaaaaaaaaaaaaaaaaaaaaaaaaaaaaaaaaaaaaaaaaaaaaaaaaaaaaaaaaaaaaaaaaaaaaaaaaaaaaaaaaaagaauu

SEQ ID NO: 9551 - RNA, 1900 nt, Artificial Sequence
  mRNA Design a-1 (hSL-A100-N5) comprising derived and/or modified sequence from Pf(3D7)__XP_001351122.1__HsALB_Pf-CSP(93-384)_L(PVTN)_HBsAg (opt6)
aggagagucccgcagucggcguccagcggcucugcuuguucgugugugugucguugcaggccuuauucaagcuuaccaugaaauggguaacuuuuauaucccuccuauuucuauuuucaucagccuauucaaaacuaaaacaacccgcagauggaaaucccgacccaaaugcaaauccaaauguagauccaaacgccaacccaaaugucgacccaaaugcaaacccaaacguagauccuaacgcaaacccaaaugcuaauccaaacgcuaacccaaacgcaaauccaaaugcuaacccaaacgcaaacccuaacgcaaacccaaacgcuaacccaaacgcaaacccaaacgccaacccaaacgcaaaccccaacgcaaacccuaacgcaaacccaaacgcaaacccaaaugccaacccaaacgcaaacccaaacgcaaacccaaacguagaccccaacgcuaauccaaaugcaaauccaaacgcaaacccaaaugccaacccaaacgccaacccuaaugcaaacccaaacgcaaacccaaaugcaaaccccaacgcaaauccaaacgcaaauccaaaugcaaacccaaacgcuaacccaaacgcaaaccccaaugcaaacccaaacgcaaauccaaaugcaaacccaaaugcaaauccaaaugcaaacccaaauaaaaacaaccaaggaaacggacaaggccauaacaugccaaacgacccaaaccgcaacgucgaugaaaacgccaacgcaaauucagcgguuaaaaacaacaacaaugaagaacccucagacaaacacauaaaagaauacuuaaacaaaauacaaaacucacuaucgacagaaugguccccaugcuccguaaccugcgguaauggaauacaagucagaauaaaaccaggaucagcuaauaaaccaaaagacgaauuagacuacgcaaacgacauagaaaagaaaauaugcaaaauggaaaaauguucuucaguauuuaacguagucaacucaucacccguaacuaacauggaaaacauaaccucaggauuucuagguccuuuacucguacuacaagcaggauuuuuccuacuuacccgaauccuaacaauaccucaaucucuagacucaugguggacaucccuaaauuucuuaggcggaucaccaguuugccucggacaaaacucucaaucaccaacuucaaaucacuccccaacaucuugcccaccaauaugcccaggauaucgauggaugugucuacgacguuuuauaauauuucuauuuauacuacuacucugucuaauauuccuauuaguacuacucgacuaucaaggaaugcuccccgucuguccccucauacccggaucaacaacuacaaacaccggaccgugcaaaaccugcacaaccccagcucaaggaaauucaauguucccaucaugcugcuguacaaaaccaacagauggaaacugcacaugcauaccaaucccaucaagcugggccuuugccaaauauuuaugggaaugggccuccgucagauucucauggcucucccuucuaguuccauucguacaaugguuuguaggccuauccccaaccguauggcuauccgccauauggaugaugugguauuggggaccaucacuauacucaauaguauccccauucauaccacuccuacccauauucuuuugccuauggguauacauuuaaggacuagucccuguucccagagcccacuuuuuuuucuuuuuuugaaauaaaauagccugucuuucagaucucaaaggcucuuuucagagccaccaaaaaaaaaaaaaaaaaaaaaaaaaaaaaaaaaaaaaaaaaaaaaaaaaaaaaaaaaaaaaaaaaaaaaaaaaaaaaaaaaaaaaaaaaaaaaaaaaaaaagaauu

SEQ ID NO: 9552 - RNA, 1561 nt, Artificial Sequence
  mRNA Design a-1 (hSL-A100-N5) comprising derived and/or modified sequence from Pf(3D7)__XP_001351122.1__HsALB_Pf-CSP(199-377)_L(PVTN)_HBsAg (opt6)
aggagagucccgcagucggcguccagcggcucugcuuguucgugugugugucguugcaggccuuauucaagcuuaccaugaaauggguaacauucauaucauuacucuucuuauuuuccucugcauacucagauccaaaugcaaacccaaaugcaaacccaaacgcaaacccaaaugccaauccaaaugcaaacccaaaugcaaacccaaacgcaaacccaaacgcaaacccaaacgcaaacccuaaugcaaacccaaaugcaaauccaaacgcuaacccaaacgcaaacccaaaugccaacccaaacgccaauccaaacgcaaacccaaacgcaaaucccaaugcaaacccuaacaaaaacaaucaaggaaacggacaaggccacaacaugccaaaugacccaaaccgcaauguagacgaaaaugccaacgcaaacuccgcuguaaaaaacaauaacaacgaagaaccuuccgauaaacauauaaaagaauacuuaaauaaaauacaaaauucauuaucaacagaauggucaccaugcucagucacaugcggaaauggaauacaaguaagaauaaaacccgguuccgcaaacaaaccaaaagacgaacuagacuacgcaaaugacaucgaaaaaaaaauaugcaaaauggaaaaauguucuucaguaccaguaacaaacauggaaaacaucaccucuggauuccuaggaccacuauuaguacuacaagcaggauucuuccuccuaacaagaauauuaacaauaccacaaucacuugacucaugguggacaucccucaauuuccuaggaggauccccaguaugucuaggucaaaacucucaaucuccaacauccaaccauucacccacaucaugcccucccauaugcccaggauaccgauggaugugccucagaagauucauaauauuccuauucauauuacuccuauguuuaaucuuucuacuagucuuauuagacuaccaaggaaugcuaccaguaugcccacuaaucccaggauccacaacaacaaacacaggccccugcaaaacauguacaacaccagcacaaggaaacucaauguucccaucaugcuguugcacaaaaccaacagacggaaacugcacaugcaucccaauaccaucaucuugggcauuugcaaaauacuuaugggaaugggcaucaguacgcuuuucauggcucucccuccucguaccauucguccaaugguucguaggucuaucaccaacaguuuggcuauccgcuauauggaugaugugguauuggggcccuucccuauacucaauaguuucaccauuuauaccacuccuaccaauauuuuucugccuuuggguauacauauaaggacuagucccuguucccagagcccacuuuuuuuucuuuuuuugaaauaaaauagccugucuuucagaucucaaaggcucuuuucagagccaccaaaaaaaaaaaaaaaaaaaaaaaaaaaaaaaaaaaaaaaaaaaaaaaaaaaaaaaaaaaaaaaaaaaaaaaaaaaaaaaaaaaaaaaaaaaaaaaaaaaaagaauu

SEQ ID NO: 9553 - RNA, 1258 nt, Artificial Sequence
  mRNA Design a-1 (hSL-A100-N5) comprising derived and/or modified sequence from Pf(3D7)__XP_001351122.1__HsALB_Pf-CSP(19-272)_L(AAY)_Pf-CSP(346-3 75)_L(AAY)_Pf-CSP(310-327) (opt6)
aggagagucccgcagucggcguccagcggcucugcuuguucgugugugugucguugcaggccuuauucaagcuuaccaugaaauggguaaccuucauuucacuucucuuccuauucuccagcgcauacucacucuuccaagaauaccaaugcuacggcucaaguuccaacacacgaguacuaaacgaauuaaacuacgacaaugcuggaaccaaccuauacaacgaacucgaaaugaacuacuacgguaaacaagaaaacugguauucacuaaaaaaaaacucaaggucccuaggagaaaacgacgacggaaacaacgaagacaacgaaaaauuaagaaaaccaaaacacaaaaaacuaaaacaacccgcagacggaaaccccgacccaaacgcaaacccaaacguagauccaaacgcaaacccaaacguagacccaaacgcaaacccaaacguagacccaaacgcaaacccuaaugcaaacccaaacgcaaacccaaacgcaaacccaaacgcaaacccaaacgcaaacccaaacgcaaaccccaacgccaacccaaacgcaaacccaaacgcaaacccaaacgcaaacccaaacgcaaacccaaacgcaaacccaaacgcaaacccaaacgcaaacccaaaugcaaacccaaacgcaaacccaaacguagacccaaacgcaaacccaaacgcaaacccaaaugcaaacccaaacgcaaacccaaacgcaaacccaaacgcuaacccaaacgcaaacccaaacgcuaauccaaaugcuaaccccaacgcaaacccaaaugcaaacccaaacgcuaauccaaaugcaaauccaaacgcaaacccaaacgcaaacccaaacgcaaacccaaacgcaaacccaaacgcaaauccagccgcauacauaaaacccggcucagcaaacaaaccaaaagacgaacuagacuacgccaacgacauagaaaaaaaaauaugcaaaauggaaaaaugcucagccgcauacgaaccaucagacaaacacaucaaagaauacuuaaacaaaauacaaaacagcuuauaaggacuagucccuguucccagagcccacuuuuuuuucuuuuuuugaaauaaaauagccugucuuucagaucucaaaggcucuuuucagagccaccaaaaaaaaaaaaaaaaaaaaaaaaaaaaaaaaaaaaaaaaaaaaaaaaaaaaaaaaaaaaaaaaaaaaaaaaaaaaaaaaaaaaaaaaaaaaaaaaaaaaagaauu

SEQ ID NO: 9554 - RNA, 1306 nt, Artificial Sequence
  mRNA Design a-1 (hSL-A100-N5) comprising derived and/or modified sequence from Pf(3D7)__XP_001351122.1__HsALB_Pf-CSP(19-272)_L(AAY)_Pf-CSP(346-3 75)_L(AAY)_Pf-CSP(310-327)_L(AAY)_PADRE (opt6)
aggagagucccgcagucggcguccagcggcucugcuuguucgugugugugucguugcaggccuuauucaagcuuaccaugaaauggguaacauucauaucacuacuauuccuauucucauccgccuacucacucuuucaagaauaucaaugcuacggaucaagcucaaauacaagaguacuaaacgaacuaaacuacgacaacgcaggaaccaaccuauacaacgaacuagaaaugaacuacuacggaaaacaagaaaacugguacucacuuaaaaaaaacucaagaucacuaggagaaaacgacgacggaaacaacgaagacaacgaaaaacuacgaaaaccaaaacauaaaaaacuaaaacaaccagcagacggaaacccagacccaaacgcaaauccaaacguagacccaaaugcaaacccaaacguagacccaaacgcaaacccaaacguagacccaaaugcaaacccaaacgcaaauccaaacgcaaacccaaacgcaaacccaaacgcaaacccaaacgcaaacccaaacgcaaacccaaaugcaaauccaaacgcaaacccaaaugcaaacccaaacgcaaacccaaacgcgaacccaaacgccaaccccaacgcaaacccaaacgcaaauccaaaugcaaacccaaacgccaauccaaacguagacccaaacgcaaauccaaacgcaaacccaaacgcaaacccaaacgcaaacccuaacgcaaacccaaacgcaaacccaaacgcaaacccaaacgccaacccaaacgcaaaccccaacgcaaacccaaacgcaaacccaaacgcaaaccccaacgcaaauccaaacgcuaacccaaacgcuaaccccaacgcaaacccaaaugcaaacccaaacgccaacccagccgcauacauaaaaccaggaucagcaaauaaaccaaaagacgaacuagacuacgcaaacgacauagaaaaaaaaauaugcaaaauggaaaaaugcuccgcagcauacgaaccaucagacaaacacaucaaagaauaccuaaacaaaauccaaaacucacuagccgccuacgcaaaauuugucgcagcauggacacucaaagcagcagcauaaggacuagucccuguucccagagcccacuuuuuuuucuuuuuuugaaauaaaauagccugucuuucagaucucaaaggcucuuuucagagccaccaaaaaaaaaaaaaaaaaaaaaaaaaaaaaaaaaaaaaaaaaaaaaaaaaaaaaaaaaaaaaaaaaaaaaaaaaaaaaaaaaaaaaaaaaaaaaaaaaaaaagaauu

SEQ ID NO: 9555 - RNA, 1306 nt, Artificial Sequence
  mRNA Design a-1 (hSL-A100-N5) comprising derived and/or modified sequence from Pf(3D7)__XP_001351122.1__HsALB_Pf-CSP(19-272)_L(AAY)_Pf-CSP(310-3 27)_L(AAY)_Pf-CSP(346-375)_L(AAY)_PADRE (opt6)
aggagagucccgcagucggcguccagcggcucugcuuguucgugugugugucguugcaggccuuauucaagcuuaccaugaaauggguaaccuucauaucccuacuauuucuauucuccucagcauacucacuauuccaagaauaccaaugcuacggcucaucaucaaacacaagaguacuaaaugaacuaaacuacgacaacgccggaaccaaccuauacaaugaacucgaaaugaauuacuacggaaaacaagaaaacugguacucacuaaaaaaaaacucaagaagccuaggagaaaacgacgacggaaacaacgaagacaacgaaaaauuacgaaaaccaaaacauaaaaaacuaaaacaacccgccgacggaaacccagacccaaacgcaaacccaaacguagacccaaacgcaaauccaaacguagacccaaacgcaaauccaaauguagacccaaacgcaaacccaaacgcaaacccaaacgcaaacccaaacgcaaacccgaacgcaaauccaaacgcaaacccaaacgcaaacccaaacgcaaacccaaacgcaaacccaaacgcaaaccccaacgcaaacccaaaugcaaacccaaacgcaaacccaaaugcaaauccaaacgcaaacccaaacgcaaacccaaacgcaaacccaaacguagacccaaaugcaaaccccaacgcaaacccaaacgcaaacccaaacgcaaacccaaacgcaaacccaaacgcaaacccaaacgcaaacccaaacgcaaacccaaacgccaauccaaacgcaaauccaaacgcaaacccaaacgcaaacccaaacgcaaacccaaacgcaaacccaaacgcaaacccaaacgcaaacccaaaugcaaacccaaacgcaaacccagcagcauacgaaccuucagacaaacacauaaaagaauacuuaaacaaaauacaaaacucacuagcagccuacaucaaaccaggauccgcaaacaaaccaaaagacgaacuagacuacgcaaacgacauagaaaaaaaaauauguaaaauggaaaaaugcucagccgcauaugcuaaauucgucgcagcauggaccuuaaaagcagcagcauaaggacuagucccuguucccagagcccacuuuuuuuucuuuuuuugaaauaaaauagccugucuuucagaucucaaaggcucuuuucagagccaccaaaaaaaaaaaaaaaaaaaaaaaaaaaaaaaaaaaaaaaaaaaaaaaaaaaaaaaaaaaaaaaaaaaaaaaaaaaaaaaaaaaaaaaaaaaaaaaaaaaaagaauu

SEQ ID NO: 9556 - RNA, 1360 nt, Artificial Sequence
  mRNA Design a-1 (hSL-A100-N5) comprising derived and/or modified sequence from Pf(3D7)__XP_001351122.1__HsALB_Pf-CSP(19-272)_L(AAY)_Pf-CSP(310-3 27)_L(AAY)_Pf-CSP(346-375)_L(AAY)_PADRE_L(AAY)_P2 (opt6)
aggagagucccgcagucggcguccagcggcucugcuuguucgugugugugucguugcaggccuuauucaagcuuaccaugaaaugggucaccuucaucucacuacuauuuuuauucuccagcgcauacucauuauuccaagaauaccaaugcuauggcucaagcucaaacacaagaguauuaaacgaacuaaacuacgauaacgccggaacaaaccuauacaacgaacucgaaaugaacuacuauggaaaacaagaaaacugguacucacuuaaaaaaaauucaagaucucuaggagaaaacgacgacggaaacaaugaagacaacgagaaauuaagaaaaccaaaacacaaaaaacuaaaacaaccagcagacggaaacccagacccaaacgcaaacccaaacguagacccaaacgcaaacccaaacguagacccaaacgcaaacccaaacguagauccgaacgcaaauccaaacgcaaauccaaacgcaaacccaaaugcaaacccaaaugcaaacccaaaugcaaacccaaacgcaaacccaaacgcaaacccaaacgcaaaccccaacgcaaacccaaacgcaaauccaaacgcaaacccaaacgcaaacccaaacgcaaaccccaacgcaaacccaaacgcaaacccgaacgcgaacccaaacguggauccaaacgcaaacccaaaugcaaaucccaacgcaaacccaaaugcaaacccaaacgcaaacccaaacgcaaacccaaacgcaaacccaaaugcaaacccaaacgcaaacccaaacgcaaacccaaacgcaaacccaaacgcaaauccaaacgcaaauccaaaugcaaacccaaacgcaaacccaaacgcaaaccccaacgcaaauccaaacgcaaacccagccgcauacgaaccaucagacaaacauauaaaagaauaucuaaacaaaauucaaaacucacucgcagcauacauaaaaccaggaagcgcaaacaaaccuaaagacgaacuagacuacgcaaacgacauagaaaaaaaaauaugcaaaauggaaaaaugcucagcagcguacgcaaaauucguagcagcauggacacuaaaagcagcagccgcagcauaccaauacauaaaagcaaauucaaaauucaucggaauuacagaacuauaaggacuagucccuguucccagagcccacuuuuuuuucuuuuuuugaaauaaaauagccugucuuucagaucucaaaggcucuuuucagagccaccaaaaaaaaaaaaaaaaaaaaaaaaaaaaaaaaaaaaaaaaaaaaaaaaaaaaaaaaaaaaaaaaaaaaaaaaaaaaaaaaaaaaaaaaaaaaaaaaaaaaagaauu

SEQ ID NO: 9557 - RNA, 1324 nt, Artificial Sequence
  mRNA Design a-1 (hSL-A100-N5) comprising derived and/or modified sequence from Pf(3D7)__XP_001351122.1__HsALB_Pf-CSP(19-272)_L(AAY)_Pf-CSP(310-3 27)_Linker (AAY)_Pf-CSP(346-397) (opt6)
aggagagucccgcagucggcguccagcggcucugcuuguucgugugugugucguugcaggccuuauucaagcuuaccaugaaauggguuacauucauaucauuacuauuccucuuuuccucagcauacucacucuuucaagaauaccaaugcuacggcucauccucaaacacaagaguacucaacgaacucaacuaugacaacgcaggaacaaaccucuacaacgaacuugaaaugaauuacuauggaaaacaagaaaacugguacucauuaaaaaaaaacucaagauccuuaggcgaaaacgacgacggaaacaacgaagacaacgagaaacuccgaaaaccaaaacacaaaaaacuaaaacaaccagcagacggaaacccagacccaaacgcaaacccaaacguagacccaaacgcaaacccaaacguagacccaaacgcaaacccaaacguagacccaaacgcaaacccaaacgcaaacccaaacgcaaacccaaacgcaaacccaaacgcaaacccaaacgcaaacccaaacgcaaacccaaacgcaaacccaaacgcaaacccaaacgcaaacccaaacgccaacccaaacgcaaacccaaacgccaacccaaacgcaaacccaaacgcaaacccaaacgcaaauccaaacgccaacccaaacguagacccaaacgcaaacccaaacgcaaacccaaacgcaaacccaaacgcaaaccccaacgccaacccaaacgccaaccccaacgcaaauccaaacgcaaacccaaacgcaaaccccaacgcaaacccaaacgcaaacccaaacgcaaacccaaacgcuaacccaaacgcaaaccccaacgcaaauccaaacgcaaacccaaacgcaaacccaaaugcaaacccagcagcauaugaaccuucagauaaacacauaaaagaauaccuaaacaaaauccaaaacucucucgcagccuacaucaaaccaggaucagcaaacaaacccaaagacgaacuagacuacgcaaaugauaucgaaaaaaaaauaugcaaaauggaaaaaugcucgagcguauuuaacguaguaaacucaucaaucggacucauaaugguacuaucauuucuauuccucaacuaaggacuagucccuguucccagagcccacuuuuuuuucuuuuuuugaaauaaaauagccugucuuucagaucucaaaggcucuuuucagagccaccaaaaaaaaaaaaaaaaaaaaaaaaaaaaaaaaaaaaaaaaaaaaaaaaaaaaaaaaaaaaaaaaaaaaaaaaaaaaaaaaaaaaaaaaaaaaaaaaaaaaagaauu

SEQ ID NO: 9558 - RNA, 1924 nt, Artificial Sequence
  mRNA Design a-1 (hSL-A100-N5) comprising derived and/or modified sequence from Pf(3D7)__XP_001351122.1__LumSynt_L(GGS4-GGG)_Pf-CSP(19-397) (opt11)
aggagagucccgcagucggcguccagcggcucugcuuguucgugugugugucguugcaggccuuauucaagcuuaccaugcaaauauacgagggcaaacucacggcugaaggccuacgcuuuggcaucgucgcaucacgguucaaucacgcacucguggacaggcucguagaaggugccaucgacgcaauaguacgccacggcgggcgcgaagaggacauaacgcuaguacgcguacccggaagcugggaaauccccguagccgcaggcgaacucgcacgcaaagaagacaucgacgccgugaucgcaauaggaguccugauccgaggcgcaacaccacacuucgacuacaucgccuccgaagucucaaaaggccuagcggaucugagccucgaacugcgcaaaccuauaacauucggcgucauaacagccgacacauuagaacaggccauagaaagagccggaaccaaacauggaaacaaaggcugggaagcggcccuaagcgccaucgaaauggcaaaccucuucaaaagccugcgcggaggaucaggcggcagcggcggcuccggaggaagcggcggcggucuuuuucaagaauaccaaugcuacggcuccucaucgaacacacgcguacucaaugaacugaacuacgacaaugcaggaaccaaccucuacaacgaacucgagaugaacuacuacggcaaacaagaaaacugguacucgcuaaagaaaaacuccagaucccugggcgaaaacgacgacggaaacaacgaagacaacgaaaaacuacgcaaaccaaaacacaagaaacuaaaacaaccagcagacggaaacccagacccaaacgcgaacccaaacgucgacccaaacgcaaacccaaacguagacccaaacgcaaacccaaacgucgaccccaacgcaaacccaaacgccaaccccaacgcaaaccccaacgcgaacccaaacgcgaaccccaacgcaaacccaaacgcaaaccccaacgcaaacccaaacgcaaacccaaacgccaacccgaaugccaacccgaacgcaaacccgaacgcaaaccccaacgcgaaccccaacgcaaacccaaaugccaaccccaacgcaaaccccaacguagacccgaacgcaaacccgaacgcaaacccgaacgcaaacccaaacgcaaacccaaacgccaaccccaacgccaacccaaacgcgaacccaaaugcaaaccccaacgccaacccgaacgccaacccaaacgcaaacccgaacgcaaaccccaacgcaaaccccaacgcaaaccccaacgcaaacccgaacgccaacccaaacgcaaacccaaacgcaaacccaaacaaaaacaaccaaggaaacgggcaaggccacaacaugcccaacgacccaaaccgaaauguagaugaaaacgcaaacgccaacagcgcggucaaaaacaacaacaacgaagaacccucggacaaacacauaaaagaauaccuaaacaaaauccagaacucccucucaacagaauggucccccugcucaguuaccugcgguaaugguauacaaguccgcauuaaaccgggaucugccaacaaaccaaaagaugagcuagacuacgccaacgacauagaaaagaaaaucugcaaaauggagaaaugcuccucagucuucaacguaguaaacagcucgauagggcucaucaugguacucuccuuuuuauuccucaacuaaggacuagucccuguucccagagcccacuuuuuuuucuuuuuuugaaauaaaauagccugucuuucagaucucaaaggcucuuuucagagccaccaaaaaaaaaaaaaaaaaaaaaaaaaaaaaaaaaaaaaaaaaaaaaaaaaaaaaaaaaaaaaaaaaaaaaaaaaaaaaaaaaaaaaaaaaaaaaaaaaaaaagaauu

SEQ ID NO: 9559 - RNA, 1786 nt, Artificial Sequence
  mRNA Design a-1 (hSL-A100-N5) comprising derived and/or modified sequence from Pf(3D7)__XP_001351122.1__HsALB_Pf-CSP(19-272)_L(PVTN)_HBsAg (opt11)
aggagagucccgcagucggcguccagcggcucugcuuguucgugugugugucguugcaggccuuauucaagcuuaccaugaaaugggucaccuucaucucccuccucuuccucuucuccucugccuacucacucuuccaagaauaccaaugcuacggcuccucuuccaacacccgcguacucaacgaacucaacuaugacaaugcaggaaccaaccuauacaacgagcuagagaugaacuacuacggcaaacaagaaaacugguacucccucaagaaaaacucacgcucccuuggcgaaaaugacgacggcaacaacgaagacaacgaaaaacuucgcaaacccaaacacaagaaauuaaaacaaccagccgacggcaacccagaccccaacgccaaccccaacgucgaccccaacgccaacccuaacgucgaccccaacgcaaacccuaacgucgauccaaacgccaaccccaacgcuaaccccaacgcaaauccgaacgcaaaccccaacgccaacccuaacgccaaccccaacgccaacccaaacgccaaccccaacgcuaaccccaacgcaaacccgaacgccaaccccaacgccaaccccaacgcaaaccccaacgccaaccccaaugcaaaccccaacgccaacccaaaugccaaccccaacgucgaccccaacgcaaaccccaacgcuaacccuaacgcuaacccaaacgccaacccaaacgcuaaccccaacgccaaccccaacgccaaccccaacgcaaacccaaacgcaaacccuaacgccaacccuaacgcaaaccccaacgcgaaccccaacgcaaaccccaacgcaaaccccaacgccaaccccaacgccaacccaaacgccaauccaaacgcaaaucccccagucaccaacauggaaaacaucaccucaggcuuccucggcccccuucucguccuacaagcugguuucuuccuucuaacccgcauccucacgaucccccaaucccucgacucaugguggaccucacucaacuuucucggaggcucacccguaugccucggacaaaacucccaaucccccaccuccaaccauuccccaaccucaugcccaccaauaugccccggcuaccguuggaugugccuccgccguuucaucauauuccuuuucauacuccuccucugccucaucuuccugcucgugcuccuagacuaucaagguaugcuacccguaugcccacucauccccggcucaaccacgacaaacacuggccccugcaaaacaugcaccacacccgcacaaggaaacuccauguuccccucaugcugcugcaccaaaccaacagacggaaacuguaccugcaucccuauccccuccuccugggccuucgcaaaauaucuaugggagugggccagcguacgcuuuuccuggcuuucccuccugguccccuucguccaaugguucguaggccucuccccaaccguauggcuauccgcaaucuggaugaugugguacuggggcccaucucucuacucaauaguaucacccuucaucccacuccuccccaucuucuucugccucuggguauacaucuaaggacuagucccuguucccagagcccacuuuuuuuucuuuuuuugaaauaaaauagccugucuuucagaucucaaaggcucuuuucagagccaccaaaaaaaaaaaaaaaaaaaaaaaaaaaaaaaaaaaaaaaaaaaaaaaaaaaaaaaaaaaaaaaaaaaaaaaaaaaaaaaaaaaaaaaaaaaaaaaaaaaaagaauu

SEQ ID NO: 9560 - RNA, 1903 nt, Artificial Sequence
  mRNA Design a-1 (hSL-A100-N5) comprising derived and/or modified sequence from Pf(3D7)__XP_001351122.1__HsALB_Pf-CSP(19-272)_L(AAY)_Pf-CSP(346-3 65)_L(AAY)_PADRE_L(PVTN)_HBsAg (opt11)
aggagagucccgcagucggcguccagcggcucugcuuguucgugugugugucguugcaggccuuauucaagcuuaccaugaaauggguaaccuucauaucccuucuauucuuauucucuuccgcauacucccucuuccaagaauaucagugcuacggcucauccucaaacacacgaguccucaacgaacucaacuacgacaacgccggcaccaaucucuacaacgaacucgaaaugaacuacuacggcaaacaagaaaacugguacucccuuaagaaaaacucacgcucucucggcgaaaacgacgacggcaacaacgaagacaacgaaaaauuacgcaaacccaaacacaagaaacucaaacaaccagccgacggcaacccagaccccaaugcaaacccuaacgucgaccccaacgccaacccuaacgucgacccaaacgccaacccgaacgucgaccccaacgcaaacccaaacgccaaccccaaugccaaucccaacgccaacccuaacgccaaccccaacgccaaccccaacgccaacccuaacgccaaccccaaugcaaacccaaacgccaacccaaacgcaaacccaaacgccaauccaaacgccaacccaaacgccaaccccaacgccaacccaaacgccaaucccaacgccaaccccaacguagaccccaaugcgaacccaaacgccaacccuaacgccaaccccaacgcaaacccaaacgcuaacccaaacgcaaaccccaacgcaaaccccaacgcaaacccgaacgcgaaccccaacgccaauccaaacgcaaacccuaacgcaaacccaaacgccaacccaaacgccaacccaaacgcaaacccaaacgccaauccaaacgcaaacccgaacgcaaaccccgccgcuuacaucaaacccggaucggccaacaaacccaaagacgaacuugauuacgccaacgacaucgaagcagccuacgcaaaauucguagcggccuggacccuaaaagcagcagcacccgucacaaacauggaaaacaucacaucuggcuucuuaggcccacuccuaguccuccaggccggcuucuuccuacuaacccguauacucaccauaccacaaucacucgacucaugguggaccucccuaaacuuccucggcggaucacccgucugccugggccaaaacucgcaaucccccaccucaaaucauucgcccacaucaugcccgcccaucugccccggcuaccgguggaugugccuccgcagauucauaaucuuccucuucauacuacuacuuugccuaaucuuccucuuaguccuacucgacuaccaaggcaugcuccccgucugcccccuuauacccggcuccaccaccaccaauaccggccccugcaaaaccugcacaacacccgcccaaggcaacucaauguucccguccugcuguugcaccaaaccaaccgacggaaauugcacaugcaucccaauccccucaucaugggcauucgccaaauaccucugggaaugggccuccguccguuucuccuggcucagccuacucguucccuucguccaaugguuugucggccuuucaccuacaguauggcuauccgccauauggaugaugugguacuggggacccucacucuacucaauugucucccccuucaucccauuacuccccaucuucuucugccucugggucuacauauaaggacuagucccuguucccagagcccacuuuuuuuucuuuuuuugaaauaaaauagccugucuuucagaucucaaaggcucuuuucagagccaccaaaaaaaaaaaaaaaaaaaaaaaaaaaaaaaaaaaaaaaaaaaaaaaaaaaaaaaaaaaaaaaaaaaaaaaaaaaaaaaaaaaaaaaaaaaaaaaaaaaaagaauu

SEQ ID NO: 9561 - RNA, 2122 nt, Artificial Sequence
  mRNA Design a-1 (hSL-A100-N5) comprising derived and/or modified sequence from Pf(3D7)__XP_001351122.1__HsALB_Pf-CSP(19-384)_L(PVTN)_HBsAg (opt11)
aggagagucccgcagucggcguccagcggcucugcuuguucgugugugugucguugcaggccuuauucaagcuuaccaugaaaugggucaccuucauaucacuccuauuccuauuuucaagcgccuacucccucuuccaagaauaucaaugcuauggcucaagcucaaacacccgcguccucaacgagcuaaacuacgacaacgcaggaaccaaccucuacaacgaacuggaaaugaacuacuacggaaaacaagagaacugguacuccuuaaagaaaaacucccgcucccucggcgaaaacgaugacgguaacaacgaagacaaugaaaaacuccgaaaacccaaacacaagaaacuaaaacaaccagccgacggaaaccccgacccgaacgcaaaccccaacguagacccaaacgcaaacccuaauguagacccaaacgccaacccaaacgucgacccaaacgcaaacccaaacgcuaaccccaacgccaacccaaacgccaaccccaacgccaaccccaaugccaacccaaacgcgaaccccaacgcaaaccccaacgccaacccgaacgccaacccaaacgccaacccaaacgccaaccccaacgcgaacccaaacgccaacccaaacgcuaaccccaacgcaaaccccaacgccaacccuaacgucgacccaaacgccaaucccaacgccaaccccaacgcaaaccccaacgccaacccgaacgcgaaccccaacgcaaaccccaacgcaaacccaaacgccaaccccaacgccaacccaaacgccaacccgaacgccaacccaaacgcgaaucccaaugccaaccccaacgccaauccuaaugcaaacccaaacgcaaaccccaacgccaauccgaacgcaaacccgaacaaaaacaaccaagguaacggccaaggccacaacaugcccaacgaccccaaccgcaacgucgacgaaaacgcaaacgccaacuccgcaguuaaaaacaacaacaacgaagaaccaucagacaaacacauaaaagaauaccucaacaaaauccaaaacucgcucuccaccgaauggucccccuguagcguaaccugcgguaauggaauacaaguccgaaucaaaccaggcucugccaacaaacccaaagacgaacuagacuacgccaacgacauugaaaagaaaaucugcaaaauggaaaaauguagcuccgucuucaacguagucaacuccucccccguuaccaacauggagaacauaaccuccggcuuccucggcccccuucucgugcuacaggccggauucuuccuccuaaccaggauccuaaccaucccccagucacucgacuccugguggaccucacucaacuuccucggcggaucccccgucugccucggacaaaacucccaaucccccaccucaaaccacuccccaaccucuugcccgcccauaugccccgguuaccgcuggaugugccuucgccgcuucaucauauuucuauucauccuccuucucugccuaauauuccuacucguacuccucgacuaccaaggcaugcuacccgucugcccucuuauacccggauccacgacaaccaacaccggccccugcaaaaccugcaccacacccgcccaaggcaacucuauguuccccucaugcugcugcacaaaacccaccgacggcaacugcacaugcauaccaauccccucuuccugggccuuugccaaauaccuuugggaaugggcuuccguccguuuuuccugguuaucccuccuggucccauucguccaaugguucgucggccuuucaccaaccgucuggcuauccgccaucuggaugaugugguacuggggucccucccucuacagcaucgucucaccauuuaucccccuccugcccaucuucuucugcuuguggguauacauaugaggacuagucccuguucccagagcccacuuuuuuuucuuuuuuugaaauaaaauagccugucuuucagaucucaaaggcucuuuucagagccaccaaaaaaaaaaaaaaaaaaaaaaaaaaaaaaaaaaaaaaaaaaaaaaaaaaaaaaaaaaaaaaaaaaaaaaaaaaaaaaaaaaaaaaaaaaaaaaaaaaaaagaauu

SEQ ID NO: 9562 - RNA, 1939 nt, Artificial Sequence
  mRNA Design a-1 (hSL-A100-N5) comprising derived and/or modified sequence from Pf(3D7)__XP_001351122.1__HsALB_Pf-CSP(19-384)_L(SGG)_Ferritin (opt11)
aggagagucccgcagucggcguccagcggcucugcuuguucgugugugugucguugcaggccuuauucaagcuuaccaugaaaugggucaccuucauaucacuacuuuuccuguucuccucagcauacucacucuuccaagaguaccaaugcuacggcucaucauccaauacccgcguacuuaacgaauuaaacuacgacaacgcaggcaccaaccucuacaacgaacucgaaaugaacuauuacggaaaacaagaaaacugguacucacuaaagaaaaacagcagaucccucggcgaaaacgacgacggcaauaacgaagacaacgaaaaacugagaaaaccuaaacacaagaaacucaaacaacccgcagacggcaaccccgaccccaacgccaacccaaacguagaccccaacgccaaccccaacgucgaccccaacgccaacccuaaugucgacccaaacgcaaacccuaacgcaaaccccaaugccaacccaaacgccaaccccaacgcaaaccccaacgcaaauccaaacgcaaaucccaacgcaaaccccaaugccaaccccaacgcaaacccaaacgccaaccccaacgcaaaccccaacgcuaacccaaacgccaacccaaacgcaaacccaaacgccaaccccaacgcuaaccccaacgucgaccccaacgccaaccccaacgcaaacccaaacgccaaccccaaugcaaacccaaacgccaaccccaacgcaaacccaaacgccaacccaaacgccaaccccaacgcaaaccccaacgcuaaccccaacgcaaaccccaaugcaaacccgaacgccaacccaaacgcaaacccaaacgccaacccaaacgccaaccccaacgccaacccaaacgccaacccaaacaaaaacaaccaagguaacggacaaggccacaacaugcccaacgauccuaaccgcaacguagacgaaaacgccaacgcaaacagcgcagucaaaaacaacaacaacgaggaaccaucagacaaacacaucaaagaauaccucaacaaaauccaaaacucccuauccacagaauggucacccugcuccguaaccugcggcaacggcauccaaguacgcaucaaacccggauccgcaaacaaaccaaaagaugaauuagauuaugcaaacgacauagaaaagaaaauaugcaaaauggaaaaaugcuccuccguauucaacguagucaacuccucuucagggggacucuccaaagacaucaucaaacuucucaacgaacaagucaacaaagagaugaacagcuccaaccucuacaugucaaugucaagcuggugcuacacacacucacuggacggcgccggccucuuccuauucgaccacgccgcagaagaauacgaacacgccaagaaacuuauaaucuuccuaaacgaaaauaacguaccuguccaacucacaucaaucucggccccagaacauaaauucgaagggcucacgcaaauauuucaaaaagcauacgaacacgaacagcacaucuccgaaucaaucaacaacauugucgaccacgcaaucaaauccaaagaccacgccacauucaacuuccuacaaugguacguggccgaacaacacgaagaagaaguccucuucaaagacauacuagacaaaaucgaacuaaucggcaacgaaaaccacggccucuaccuagccgaccaauacguaaaaggaaucgcgaaaucccgcaaauccuaaggacuagucccuguucccagagcccacuuuuuuuucuuuuuuugaaauaaaauagccugucuuucagaucucaaaggcucuuuucagagccaccaaaaaaaaaaaaaaaaaaaaaaaaaaaaaaaaaaaaaaaaaaaaaaaaaaaaaaaaaaaaaaaaaaaaaaaaaaaaaaaaaaaaaaaaaaaaaaaaaaaaagaauu

SEQ ID NO: 9563 - RNA, 1900 nt, Artificial Sequence
  mRNA Design a-1 (hSL-A100-N5) comprising derived and/or modified sequence from Pf(3D7)__XP_001351122.1__HsALB_Pf-CSP(93-384)_L(PVTN)_HBsAg (opt11)
aggagagucccgcagucggcguccagcggcucugcuuguucgugugugugucguugcaggccuuauucaagcuuaccaugaaaugggucaccuuuaucucacuccuauuucucuucucuuccgcauacuccaaacucaaacaacccgcagacggaaaccccgacccaaacgcaaaccccaacguagaccccaacgccaaccccaacgucgaccccaacgccaaccccaacguagaccccaacgcaaaccccaacgccaacccaaacgccaaccccaacgccaaccccaacgccaaucccaacgccaacccaaacgcaaaucccaacgcaaaccccaacgccaaccccaacgccaacccaaacgccaauccaaacgcaaacccuaacgccaacccuaacgcgaaccccaacgccaaccccaacgcaaaccccaacgccaaccccaaugucgaccccaacgccaaccccaacgccaaccccaacgcaaaccccaacgcaaacccaaacgccaaucccaacgccaaccccaacgcaaacccuaacgccaaccccaaugccaauccuaacgccaaccccaacgccaacccuaacgccaacccaaacgccaaccccaacgccaaccccaacgccaacccuaacgccaacccuaacgccaacccaaacgccaauccaaacaagaacaaccaaggcaacggucaaggccacaauaugccaaacgacccaaaccgaaacguagacgaaaacgccaacgccaacuccgccgucaaaaacaacaacaacgaagaacccuccgacaaacacaucaaagaauaucugaacaaaauccaaaacucccucuccaccgaauggucccccugcuccgucacuuguggcaauggcauacaaguccgcaucaaacccggcucagccaacaaacccaaagacgaacucgacuacgcaaacgacaucgaaaagaaaauaugcaaaauggaaaaaugcuccucugucuucaacgucgucaacuccucgcccguaaccaacauggaaaacaucaccucaggauuccucggcccccuacucguccuccaagccggcuucuuccuccucacccgaauccuuacaaucccccaaucccuugacucaugguggaccucccuuaauuuccucggcgguucccccgucugccuuggccaaaacucacaaucccccaccucaaaccacucccccacuuccugcccgcccauaugccccggcuaccgcuggaugugccuccgccgguucaucauauuccucuucauccuacuccucugccuuauauuucuauuaguccuccuagacuaccaaggaaugcuccccguaugcccacuaauccccggauccaccaccaccaacaccggccccugcaaaaccugcaccaccccugcacaaggaaacuccauguucccaucuuguugcugcacaaaaccaaccgacggcaacuguaccugcauccccaucccuucaucaugggccuucgccaaauaccuaugggaaugggccucaguacguuucuccuggcuaucccuccucgucccauucguucaaugguucgucggccuaucccccacgguauggcucuccgcaauauggaugaugugguacuggggccccucacuauacaguauaguuucccccuucauaccccuccuccccauauucuucugccucuggguauacaucuagggacuagucccuguucccagagcccacuuuuuuuucuuuuuuugaaauaaaauagccugucuuucagaucucaaaggcucuuuucagagccaccaaaaaaaaaaaaaaaaaaaaaaaaaaaaaaaaaaaaaaaaaaaaaaaaaaaaaaaaaaaaaaaaaaaaaaaaaaaaaaaaaaaaaaaaaaaaaaaaaaaaagaauu

SEQ ID NO: 9564 - RNA, 1561 nt, Artificial Sequence
  mRNA Design a-1 (hSL-A100-N5) comprising derived and/or modified sequence from Pf(3D7)__XP_001351122.1__HsALB_Pf-CSP(199-377)_L(PVTN)_HBsAg (opt11)
aggagagucccgcagucggcguccagcggcucugcuuguucgugugugugucguugcaggccuuauucaagcuuaccaugaaauggguaaccuucaucucccuccuauucuuauucucaucagccuacuccgacccaaacgcaaaccccaaugccaaccccaacgccaaccccaacgccaaucccaacgccaaccccaacgccaaucccaaugcuaaccccaacgccaacccaaacgccaacccaaacgcaaaccccaacgccaaccccaacgccaaccccaacgccaacccaaacgccaaccccaacgcaaaccccaacgccaacccaaacgccaaccccaacgccaacccaaacaaaaacaaucaaggcaacggccaaggacacaacaugcccaacgaccccaaccgcaacgucgacgaaaacgcaaacgccaacucugcagucaaaaacaacaacaacgaagaacccuccgacaaacacauaaaagaauaccucaacaaaauccaaaacucccucuccacagaaugguccccaugcuccgucacgugcggcaacggcauccaaguacgcaucaaacccggcucugccaacaaaccuaaagacgaacucgacuacgccaacgacaucgaaaagaaaaucugcaaaauggaaaaaugcuccucaguccccguaacuaacauggaaaacaucacguccggcuuccucggcccccuccuaguccuccaagccggcuucuuccuacucacacgcauucuuaccaucccgcaaucacucgacuccugguggaccucccucaacuucuuaggcggcuccccugucugccucggccaaaacucacaaucccccacuucaaaccacucacccaccagcugcccacccauaugcccaggauaccgcuggaugugccuccgccguuucauaaucuuccucuucauacuccuacucugccuaaucuuccuccucguacuccuagacuaccaaggcaugcuccccgucugcccacucauccccggaagcacuacaaccaacaccggccccugcaaaacaugcaccacccccgcacaaggcaacuccauguuccccuccugcugcugcacaaaacccacugauggcaacugcacuugcauccccauccccuccucaugggccuucgccaaauaucucugggaaugggccagcguccgguucucuuggcucucacuccuaguccccuucguucaaugguucguaggccuaucccccaccgucuggcucuccgcaauauggaugaugugguauuggggccccucccucuacuccauuguaucccccuucaucccacuacuccccaucuucuucugccuuugggucuacauauaaggacuagucccuguucccagagcccacuuuuuuuucuuuuuuugaaauaaaauagccugucuuucagaucucaaaggcucuuuucagagccaccaaaaaaaaaaaaaaaaaaaaaaaaaaaaaaaaaaaaaaaaaaaaaaaaaaaaaaaaaaaaaaaaaaaaaaaaaaaaaaaaaaaaaaaaaaaaaaaaaaaaagaauu

SEQ ID NO: 9565 - RNA, 1258 nt, Artificial Sequence
  mRNA Design a-1 (hSL-A100-N5) comprising derived and/or modified sequence from Pf(3D7)__XP_001351122.1__HsALB_Pf-CSP(19-272)_L(AAY)_Pf-CSP(346-3 75)_L(AAY)_Pf-CSP(310-327) (opt11)
aggagagucccgcagucggcguccagcggcucugcuuguucgugugugugucguugcaggccuuauucaagcuuaccaugaaauggguaaccuucaucucacuccuauuccuguucuccagugcauacucacucuuccaagaauaccaaugcuacggcuccagcagcaacacgcgaguccucaacgaacuaaacuacgauaacgccggaaccaaccuuuacaacgaacucgaaaugaacuacuacggcaaacaagaaaacugguacucacuaaaaaaaaacagcagaucacuaggcgaaaacgacgacggaaacaacgaagacaacgaaaaacuacgcaagcccaaacacaagaaacucaaacaacccgcagacggaaacccagaccccaacgcaaaccccaacguagaccccaacgcaaaccccaacguagaccccaacgcaaaucccaacguagacccaaacgcaaaccccaacgcaaacccaaacgcaaacccaaacgcgaacccaaacgcaaacccaaacgcaaacccgaacgccaacccaaacgcaaacccaaacgcuaaccccaacgcaaacccaaacgcaaacccaaacgcaaacccaaacgcaaacccaaacgcaaacccaaacgcaaacccgaacgcaaacccaaacgcaaaccccaacguagacccaaacgccaacccaaacgcaaaccccaacgccaacccaaacgcaaacccaaacgcaaacccaaacgcaaacccaaacgcaaacccaaacgcaaacccaaacgcaaaccccaacgcgaacccaaacgccaacccaaacgcaaacccaaacgcgaacccaaacgccaaccccaacgcaaaccccaacgcaaaccccaacgcaaacccaaacgcaaaccccgccgcuuacauaaaacccggcucggccaauaaaccaaaagacgaacucgacuacgccaacgacauagaaaaaaaaauaugcaaaauggaaaaaugcagcgccgccuacgaaccaucagacaaacacaucaaagaauaccucaacaaaauacaaaacagccucuaaggacuagucccuguucccagagcccacuuuuuuuucuuuuuuugaaauaaaauagccugucuuucagaucucaaaggcucuuuucagagccaccaaaaaaaaaaaaaaaaaaaaaaaaaaaaaaaaaaaaaaaaaaaaaaaaaaaaaaaaaaaaaaaaaaaaaaaaaaaaaaaaaaaaaaaaaaaaaaaaaaaaagaauu

SEQ ID NO: 9566 - RNA, 1306 nt, Artificial Sequence
  mRNA Design a-1 (hSL-A100-N5) comprising derived and/or modified sequence from Pf(3D7)__XP_001351122.1__HsALB_Pf-CSP(19-272)_L(AAY)_Pf-CSP(346-3 75)_L(AAY)_Pf-CSP(310-327)_L(AAY)_PADRE (opt11)
aggagagucccgcagucggcguccagcggcucugcuuguucgugugugugucguugcaggccuuauucaagcuuaccaugaaauggguaacauuuaucucccuccucuuccucuuuuccuccgcauacucacucuuccaagaauaccaaugcuacggaucaagcuccaacacccgcguccuuaacgaacuuaacuacgacaacgccggcaccaacuuauacaacgaacucgagaugaacuacuacggcaaacaagaaaacugguacucccucaaaaaaaacuccagaucccucggcgaaaacgacgacggaaacaacgaagacaacgaaaaacuccgcaaacccaaacacaaaaaacucaaacaacccgcugacggcaacccugaccccaacgccaaccccaacguagaccccaacgccaaucccaacguagacccaaacgccaaccccaacguagaccccaacgccaaccccaacgcaaacccaaacgccaaccccaacgccaaccccaacgcgaacccaaacgccaaccccaacgccaacccuaacgccaacccgaacgccaaccccaacgccaaccccaacgccaaccccaacgcgaaccccaacgcaaaccccaacgccaaccccaacgcaaaccccaacgccaaccccaacgccaaccccaacguagaccccaacgccaacccaaacgccaacccaaacgcaaaccccaacgccaauccaaacgcaaaccccaacgcaaaccccaaugccaacccaaacgccaaccccaacgccaacccaaacgccaacccaaacgccaaccccaacgcaaacccaaacgcaaaccccaacgcaaacccuaacgccaacccaaacgccaacccaaacgcaaaccccaacgcaaaccccgccgccuacaucaaaccaggcuccgccaauaaaccaaaagacgaacucgacuacgcaaaugacauagaaaaaaaaauaugcaaaauggaaaaaugcuccgcagccuacgaacccagcgacaaacauaucaaagaauacuuaaacaaaauccaaaacucccuagccgccuacgccaaauucgucgcagccuggacccucaaagccgccgccuaaggacuagucccuguucccagagcccacuuuuuuuucuuuuuuugaaauaaaauagccugucuuucagaucucaaaggcucuuuucagagccaccaaaaaaaaaaaaaaaaaaaaaaaaaaaaaaaaaaaaaaaaaaaaaaaaaaaaaaaaaaaaaaaaaaaaaaaaaaaaaaaaaaaaaaaaaaaaaaaaaaaaagaauu

SEQ ID NO: 9567 - RNA, 1306 nt, Artificial Sequence
  mRNA Design a-1 (hSL-A100-N5) comprising derived and/or modified sequence from Pf(3D7)__XP_001351122.1__HsALB_Pf-CSP(19-272)_L(AAY)_Pf-CSP(310-3 27)_L(AAY)_Pf-CSP(346-375)_L(AAY)_PADRE (opt11)
aggagagucccgcagucggcguccagcggcucugcuuguucgugugugugucguugcaggccuuauucaagcuuaccaugaaaugggugaccuuuaucucacuccucuuccucuucucaagcgcauacucacucuuccaagaauaccaaugcuacgguucaagcucaaacacaagaguccucaacgaacucaacuacgacaacgccggaaccaaccucuacaacgaacucgaaaugaacuacuacggcaaacaagaaaacugguacucacucaaaaaaaacagcaggucccuaggcgaaaacgacgacggaaacaacgaagacaacgaaaaacuccgcaaaccaaaacacaaaaaacugaaacaacccgcagacggaaacccagaccccaacgcaaacccgaacgucgacccgaacgccaacccaaacguagacccaaacgcaaaccccaacgucgacccaaacgcaaacccaaacgcaaacccaaacgcaaacccgaacgcaaacccaaacgcgaacccaaacgcaaacccaaacgcaaacccaaacgccaacccaaacgcaaacccaaaugcaaaccccaacgcaaacccgaacgcaaacccaaacgcaaaccccaacgcaaacccaaacgcuaacccaaacgcgaaccccaacgcaaacccaaacguggacccaaacgcaaacccaaacgcaaacccaaacgcgaacccgaacgcaaacccaaacgcgaacccaaacgcaaaccccaacgcaaacccaaacgcaaacccaaacgccaacccaaacgcaaacccaaacgcgaaccccaacgccaacccaaacgcaaacccaaacgcaaacccaaacgcaaacccaaacgcaaacccaaacgccaacccaaacgcaaacccagcugccuacgaacccuccgacaaacacaucaaagaguaccugaacaaaauccaaaacucccucgcagccuacaucaagcccggauccgcaaacaaacccaaagacgaacucgacuacgccaacgacauagaaaaaaaaaucugcaaaauggaaaaaugcucagccgcauacgcaaaauucguagcagccuggacccuaaaagcggcagcauaaggacuagucccuguucccagagcccacuuuuuuuucuuuuuuugaaauaaaauagccugucuuucagaucucaaaggcucuuuucagagccaccaaaaaaaaaaaaaaaaaaaaaaaaaaaaaaaaaaaaaaaaaaaaaaaaaaaaaaaaaaaaaaaaaaaaaaaaaaaaaaaaaaaaaaaaaaaaaaaaaaaaagaauu

SEQ ID NO: 9568 - RNA, 1360 nt, Artificial Sequence
  mRNA Design a-1 (hSL-A100-N5) comprising derived and/or modified sequence from Pf(3D7)__XP_001351122.1__HsALB_Pf-CSP(19-272)_L(AAY)_Pf-CSP(310-3 27)_L(AAY)_Pf-CSP(346-375)_L(AAY)_PADRE_L(AAY)_P2 (opt11)
aggagagucccgcagucggcguccagcggcucugcuuguucgugugugugucguugcaggccuuauucaagcuuaccaugaaaugggugaccuucauaucacuauuauuccucuucucaagcgcauacucacucuuccaagaauaccaaugcuacggcuccuccucaaacacgcgcguacucaacgaacuaaacuacgacaacgccggaacaaaccucuacaacgaacuagaaaugaacuacuacggcaaacaagaaaacugguacucccuaaaaaaaaacucaagaucccuaggcgagaaugacgacggcaacaacgaagacaacgaaaaacuccgcaaacccaaacacaaaaaacucaaacaacccgccgacggaaacccagacccaaacgccaacccaaacgucgacccaaacgcaaaccccaacguagaccccaacgcaaacccaaacguagacccaaacgcaaacccaaacgcaaacccaaacgcaaaccccaacgccaacccaaacgcaaacccaaacgccaauccaaacgcaaacccaaaugccaacccaaacgcaaacccaaacgcaaacccaaacgccaaccccaacgcaaacccaaacgcaaacccaaacgccaacccaaacgcaaacccaaacgcaaaccccaacgccaacccgaacguagaccccaacgcaaaccccaacgcaaacccaaacgccaauccaaacgcaaaccccaacgcaaaccccaacgcaaaccccaacgccaauccaaacgccaaccccaacgcgaacccgaacgcaaacccaaacgcaaacccaaacgcaaacccaaacgcaaacccaaacgcaaacccaaacgcaaacccgaacgcaaaccccaacgccaacccaaacgcaaacccagccgcauacgaacccucagacaaacacauaaaagaauaccuaaacaaaauccaaaacucacucgcugccuacaucaaaccaggaagcgcaaacaaacccaaagacgaacucgauuacgccaacgacaucgaaaaaaaaaucugcaaaauggaaaaaugcuccgccgccuacgcaaaauucgucgcagccuggacucuaaaagccgccgcagccgcauaccaauacauaaaagccaacucaaaauucaucggaaucaccgaacuguaaggacuagucccuguucccagagcccacuuuuuuuucuuuuuuugaaauaaaauagccugucuuucagaucucaaaggcucuuuucagagccaccaaaaaaaaaaaaaaaaaaaaaaaaaaaaaaaaaaaaaaaaaaaaaaaaaaaaaaaaaaaaaaaaaaaaaaaaaaaaaaaaaaaaaaaaaaaaaaaaaaaaagaauu

SEQ ID NO: 9569 - RNA, 1324 nt, Artificial Sequence
  mRNA Design a-1 (hSL-A100-N5) comprising derived and/or modified sequence from Pf(3D7)__XP_001351122.1__HsALB_Pf-CSP(19-272)_L(AAY)_Pf-CSP(310-3 27)_Linker (AAY)_Pf-CSP(346-397) (opt11)
aggagagucccgcagucggcguccagcggcucugcuuguucgugugugugucguugcaggccuuauucaagcuuaccaugaaaugggucaccuucaucucacuccuguuccuauucucgagcgcauacucccucuuccaagaauaccagugcuacggcucaagcucaaacacacgcguacucaacgaacuaaacuacgacaacgccggaaccaaccucuacaacgaacuagaaaugaacuacuacggcaaacaagagaacugguacucucuaaagaaaaacagcagaucccugggcgagaacgacgacggaaacaacgaagacaacgagaaacuacgcaaacccaaacacaagaaacuaaaacaacccgcagauggaaacccagauccaaacgcaaacccaaacgucgacccuaacgcaaaccccaacguagaccccaacgcaaaccccaacguagacccaaacgccaacccaaacgccaacccaaacgccaacccgaacgcaaaccccaaugccaacccaaacgccaacccgaacgccaacccaaacgcgaaccccaacgccaacccaaacgcaaacccaaacgcaaacccuaacgcaaaccccaacgccaacccaaaugccaacccaaacgcaaacccaaacgcaaacccaaacgccaaccccaacguagacccaaacgcaaaccccaacgcaaacccaaacgcaaacccaaacgccaacccaaacgcaaacccaaacgcaaacccaaacgcaaacccgaacgccaaccccaacgcaaacccaaacgcaaacccaaacgccaacccaaacgccaacccaaacgcaaaccccaacgcaaaccccaacgccaaccccaacgccaacccaaacgcaaacccaaacgcaaacccagccgcauacgaacccucagacaaacacauaaaagaauaccucaauaaaauccaaaacucacuugcagccuacauaaaaccaggcagcgcgaacaaacccaaagacgaacucgacuacgcgaacgacauagaaaagaaaaucugcaaaauggaaaaaugcucauccgucuucaaugucguaaacucauccauaggccuaaucaugguccucuccuuccuauuccucaacuaaggacuagucccuguucccagagcccacuuuuuuuucuuuuuuugaaauaaaauagccugucuuucagaucucaaaggcucuuuucagagccaccaaaaaaaaaaaaaaaaaaaaaaaaaaaaaaaaaaaaaaaaaaaaaaaaaaaaaaaaaaaaaaaaaaaaaaaaaaaaaaaaaaaaaaaaaaaaaaaaaaaaagaauu

SEQ ID NO: 9570 - RNA, 2021 nt, Artificial Sequence
  mRNA Design a-3 (hSL-A100-N5) comprising derived and/or modified sequence from Pf(3D7)__XP_001351122.1__LumSynt_L(GGS4-GGG)_Pf-CSP(19-397) (opt1)
aggagagggcgcuuggcuugcaaggacccugagcugcggcauugaagcacacccaacccaacucgacugaagucagccucacugaaccggaucugagaaucuucucucucugggcuugccagggcucuccgaaccuagcuagcauccucuucaauuccaacuagaaagcuuaccaugcagaucuacgagggcaagcugaccgccgaggggcuccgcuucggcaucguggccagccgguucaaccacgcgcuggucgaccgccugguggagggggccaucgacgccaucgugcggcacggcgggcgcgaggaggacaucacccucguccgggugcccggcuccugggagaucccgguggccgccggcgagcuggcccgcaaggaggacaucgacgcggucaucgccaucggggugcugauccggggcgccacgccccacuucgacuacaucgccagcgagguguccaaggggcucgcggaccugagccuggagcuccgcaagcccaucaccuucggcgucaucaccgccgacacccuggagcaggccaucgagcgggccgggacgaagcacggcaacaagggcugggaggccgcgcuguccgccaucgagauggccaaccucuucaagagccugcgcggcgggagcggcggguccggcgggagcggcggcuccgggggcgggcuguuccaggaguaccagugcuacggcuccagcuccaacacccgggugcucaacgagcugaacuacgacaacgcggggaccaaccuguacaacgagcucgagaugaacuacuacggcaagcaggagaacugguacagccugaagaagaacucccgcagccugggggagaacgacgacggcaacaacgaggacaacgagaagcuccggaagcccaagcacaagaagcugaagcagccggccgacgggaaccccgaccccaacgccaaccccaacguggacccgaacgccaaccccaacgucgaccccaacgccaaccccaacguggacccgaacgcgaaccccaacgccaaccccaacgccaaccccaacgccaacccgaacgcgaaccccaacgccaaccccaacgccaaccccaacgccaacccgaacgccaaccccaacgcgaaccccaacgccaaccccaacgccaacccgaacgccaaccccaacgccaaccccaacgcgaaccccaacgccaacccgaacgccaaccccaacguggaccccaacgccaaccccaacgccaacccgaacgcgaaccccaacgccaaccccaacgccaacccgaacgccaaccccaacgccaaccccaacgcgaaccccaacgccaacccgaacgccaaccccaacgccaaccccaacgcgaaccccaacgccaacccgaacgccaaccccaacgccaaccccaacgccaaccccaacgcgaacccgaacgccaaccccaacaagaacaaccagggcaacggccaggggcacaacaugcccaacgaccccaaccgcaacgucgacgagaacgccaacgccaacuccgccgugaagaacaacaacaacgaggagccgagcgacaagcacaucaaggaguaccugaacaagauccagaacucccucagcacggaguggucccccugcagcgugaccugcggcaacgggauccagguccggaucaagcccggcuccgcgaacaagcccaaggacgagcuggacuacgccaacgacaucgagaagaagaucugcaagauggagaagugcagcuccguguucaacguggucaacagcuccaucgggcugaucauggugcucagcuuccuguuccugaacugaggacuagucccuguucccagagcccacuuuuuuuucuuuuuuugaaauaaaauagccugucuuucagaucucaaaggcucuuuucagagccaccaaaaaaaaaaaaaaaaaaaaaaaaaaaaaaaaaaaaaaaaaaaaaaaaaaaaaaaaaaaaaaaaaaaaaaaaaaaaaaaaaaaaaaaaaaaaaaaaaaaaagaauu

SEQ ID NO: 9571 - RNA, 1568 nt, Artificial Sequence
  mRNA Design a-3 (hSL-A100-N5) comprising derived and/or modified sequence from Pf(3D7)__XP_001351122.1__HsALB_Pf-CSP(19-397) (opt1)
aggagagggcgcuuggcuugcaaggacccugagcugcggcauugaagcacacccaacccaacucgacugaagucagccucacugaaccggaucugagaaucuucucucucugggcuugccagggcucuccgaaccuagcuagcauccucuucaauuccaacuagaaagcuuaccaugaagugggugaccuucaucagccuccuguuccuguucuccagcgccuacucccuguuccaggaguaccagugcuacggcuccagcuccaacacccgggugcucaacgagcugaacuacgacaacgcggggaccaaccuguacaacgagcucgagaugaacuacuacggcaagcaggagaacugguacagccugaagaagaacucccgcagccugggggagaacgacgacggcaacaacgaggacaacgagaagcuccggaagcccaagcacaagaagcugaagcagccggccgacgggaaccccgaccccaacgccaaccccaacguggacccgaacgccaaccccaacgucgaccccaacgccaaccccaacguggacccgaacgcgaaccccaacgccaaccccaacgccaaccccaacgccaacccgaacgcgaaccccaacgccaaccccaacgccaaccccaacgccaacccgaacgccaaccccaacgcgaaccccaacgccaaccccaacgccaacccgaacgccaaccccaacgccaaccccaacgcgaaccccaacgccaacccgaacgccaaccccaacguggaccccaacgccaaccccaacgccaacccgaacgcgaaccccaacgccaaccccaacgccaacccgaacgccaaccccaacgccaaccccaacgcgaaccccaacgccaacccgaacgccaaccccaacgccaaccccaacgcgaaccccaacgccaacccgaacgccaaccccaacgccaaccccaacgccaaccccaacgcgaacccgaacgccaaccccaacaagaacaaccagggcaacggccaggggcacaacaugcccaacgaccccaaccgcaacgucgacgagaacgccaacgccaacuccgccgugaagaacaacaacaacgaggagccgagcgacaagcacaucaaggaguaccugaacaagauccagaacucccucagcacggaguggucccccugcagcgugaccugcggcaacgggauccagguccggaucaagcccggcuccgcgaacaagcccaaggacgagcuggacuacgccaacgacaucgagaagaagaucugcaagauggagaagugcagcuccguguucaacguggucaacagcuccaucgggcugaucauggugcucagcuuccuguuccugaacugaggacuagucccuguucccagagcccacuuuuuuuucuuuuuuugaaauaaaauagccugucuuucagaucucaaaggcucuuuucagagccaccaaaaaaaaaaaaaaaaaaaaaaaaaaaaaaaaaaaaaaaaaaaaaaaaaaaaaaaaaaaaaaaaaaaaaaaaaaaaaaaaaaaaaaaaaaaaaaaaaaaaagaauu

SEQ ID NO: 9572 - RNA, 1883 nt, Artificial Sequence
  mRNA Design a-3 (hSL-A100-N5) comprising derived and/or modified sequence from Pf(3D7)__XP_001351122.1__HsALB_Pf-CSP(19-272)_L(PVTN)_HBsAg (opt1)
aggagagggcgcuuggcuugcaaggacccugagcugcggcauugaagcacacccaacccaacucgacugaagucagccucacugaaccggaucugagaaucuucucucucugggcuugccagggcucuccgaaccuagcuagcauccucuucaauuccaacuagaaagcuuaccaugaagugggugaccuucaucagccugcucuuccuguucuccagcgccuacucccuguuccaggaguaccagugcuacggcuccagcuccaacacccgggugcucaacgagcugaacuacgacaacgcggggaccaaccuguacaacgagcucgagaugaacuacuacggcaagcaggagaacugguacagccugaagaagaacucccgcagccugggggagaacgacgacggcaacaacgaggacaacgagaagcuccggaagcccaagcacaagaagcugaagcagccggccgacgggaaccccgaccccaacgccaaccccaacguggacccgaacgccaaccccaacgucgaccccaacgccaaccccaacguggacccgaacgcgaaccccaacgccaaccccaacgccaaccccaacgccaacccgaacgcgaaccccaacgccaaccccaacgccaaccccaacgccaacccgaacgccaaccccaacgcgaaccccaacgccaaccccaacgccaacccgaacgccaaccccaacgccaaccccaacgcgaaccccaacgccaacccgaacgccaaccccaacguggaccccaacgccaaccccaacgccaacccgaacgcgaaccccaacgccaaccccaacgccaacccgaacgccaaccccaacgccaaccccaacgcgaaccccaacgccaacccgaacgccaaccccaacgccaaccccaacgcgaaccccaacgccaacccgaacgccaaccccaacgccaaccccaacgccaaccccaacgcgaacccgaacgccaaccccccggugacgaacauggagaacaucaccagcggcuuccuggggccccuccuggugcugcaggccggcuucuuccuccugacccgcauccugaccaucccgcagucccucgacagcugguggaccucccugaacuuccucgggggcagccccgucugccuggggcagaacucccagagccccaccuccaaccacagccccaccuccugcccgcccaucugccccggcuaccgguggaugugccugcgccgguucaucaucuuccuguucauccuccugcugugccucaucuuccugcuggugcuccuggacuaccagggcaugcugcccgugugcccgcucauccccgggagcacgaccaccaacaccggccccugcaagacgugcaccacccccgcccaggggaacuccauguucccgagcugcugcugcaccaagcccacggacggcaacugcacgugcauccccauccccuccagcugggcguucgccaaguaccugugggagugggccuccguccgcuucagcuggcugucccuccuggugccguucgugcagugguucgucgggcugagccccaccguguggcucuccgccaucuggaugaugugguacuggggccccagccuguacagcaucgugucccccuucaucccgcugcuccccaucuucuucugccugugggucuacaucugaggacuagucccuguucccagagcccacuuuuuuuucuuuuuuugaaauaaaauagccugucuuucagaucucaaaggcucuuuucagagccaccaaaaaaaaaaaaaaaaaaaaaaaaaaaaaaaaaaaaaaaaaaaaaaaaaaaaaaaaaaaaaaaaaaaaaaaaaaaaaaaaaaaaaaaaaaaaaaaaaaaaagaauu

SEQ ID NO: 9573 - RNA, 2000 nt, Artificial Sequence
  mRNA Design a-3 (hSL-A100-N5) comprising derived and/or modified sequence from Pf(3D7)__XP_001351122.1__HsALB_Pf-CSP(19-272)_L(AAY)_Pf-CSP(346-3 65)_L(AAY)_PADRE_L(PVTN)_HBsAg (opt1)
aggagagggcgcuuggcuugcaaggacccugagcugcggcauugaagcacacccaacccaacucgacugaagucagccucacugaaccggaucugagaaucuucucucucugggcuugccagggcucuccgaaccuagcuagcauccucuucaauuccaacuagaaagcuuaccaugaagugggugaccuucaucagccugcucuuccuguucuccagcgccuacucccuguuccaggaguaccagugcuacggcuccagcuccaacacccgggugcucaacgagcugaacuacgacaacgcggggaccaaccuguacaacgagcucgagaugaacuacuacggcaagcaggagaacugguacagccugaagaagaacucccgcagccugggggagaacgacgacggcaacaacgaggacaacgagaagcuccggaagcccaagcacaagaagcugaagcagccggccgacgggaaccccgaccccaacgccaaccccaacguggacccgaacgccaaccccaacgucgaccccaacgccaaccccaacguggacccgaacgcgaaccccaacgccaaccccaacgccaaccccaacgccaacccgaacgcgaaccccaacgccaaccccaacgccaaccccaacgccaacccgaacgccaaccccaacgcgaaccccaacgccaaccccaacgccaacccgaacgccaaccccaacgccaaccccaacgcgaaccccaacgccaacccgaacgccaaccccaacguggaccccaacgccaaccccaacgccaacccgaacgcgaaccccaacgccaaccccaacgccaacccgaacgccaaccccaacgccaaccccaacgcgaaccccaacgccaacccgaacgccaaccccaacgccaaccccaacgcgaaccccaacgccaacccgaacgccaaccccaacgccaaccccaacgccaaccccaacgcgaacccgaacgccaaccccgccgcguauaucaagcccggcuccgcgaacaagcccaaggacgagcuggacuacgccaacgacaucgaggcggccuacgccaaguucguggccgccuggacccugaaggcggccgccccggugacgaacauggagaacaucaccagcggcuuccuggggccccuccuggugcugcaggccggcuucuuccuccugacccgcauccugaccaucccgcagucccucgacagcugguggaccucccugaacuuccucgggggcagccccgucugccuggggcagaacucccagagccccaccuccaaccacagccccaccuccugcccgcccaucugccccggcuaccgguggaugugccugcgccgguucaucaucuuccuguucauccuccugcugugccucaucuuccugcuggugcuccuggacuaccagggcaugcugcccgugugcccgcucauccccgggagcacgaccaccaacaccggccccugcaagacgugcaccacccccgcccaggggaacuccauguucccgagcugcugcugcaccaagcccacggacggcaacugcacgugcauccccauccccuccagcugggcguucgccaaguaccugugggagugggccuccguccgcuucagcuggcugucccuccuggugccguucgugcagugguucgucgggcugagccccaccguguggcucuccgccaucuggaugaugugguacuggggccccagccuguacagcaucgugucccccuucaucccgcugcuccccaucuucuucugccugugggucuacaucugaggacuagucccuguucccagagcccacuuuuuuuucuuuuuuugaaauaaaauagccugucuuucagaucucaaaggcucuuuucagagccaccaaaaaaaaaaaaaaaaaaaaaaaaaaaaaaaaaaaaaaaaaaaaaaaaaaaaaaaaaaaaaaaaaaaaaaaaaaaaaaaaaaaaaaaaaaaaaaaaaaaaagaauu

SEQ ID NO: 9574 - RNA, 2000 nt, Artificial Sequence
  mRNA Design a-3 (hSL-A100-N5) comprising derived and/or modified sequence from Pf(3D7)__XP_001351122.1__HsALB_Pf-CSP(19-272)_L(AAY)_Pf-CSP(346-3 65)_L(AAY)_PADRE_L(PVTN)_HBsAg (opt1)
aggagagggcgcuuggcuugcaaggacccugagcugcggcauugaagcacacccaacccaacucgacugaagucagccucacugaaccggaucugagaaucuucucucucugggcuugccagggcucuccgaaccuagcuagcauccucuucaauuccaacuagaaagcuuaccaugaagugggugaccuucaucagccuccuguuccuguucuccagcgccuacucccuguuccaggaguaccagugcuacggcuccagcuccaacacccgggugcucaacgagcugaacuacgacaacgcggggaccaaccuguacaacgagcucgagaugaacuacuacggcaagcaggagaacugguacagccugaagaagaacucccgcagccugggggagaacgacgacggcaacaacgaggacaacgagaagcuccggaagcccaagcacaagaagcugaagcagccggccgacgggaaccccgaccccaacgccaaccccaacguggacccgaacgccaaccccaacgucgaccccaacgccaaccccaacguggacccgaacgcgaaccccaacgccaaccccaacgccaaccccaacgccaacccgaacgcgaaccccaacgccaaccccaacgccaaccccaacgccaacccgaacgccaaccccaacgcgaaccccaacgccaaccccaacgccaacccgaacgccaaccccaacgccaaccccaacgcgaaccccaacgccaacccgaacgccaaccccaacguggaccccaacgccaaccccaacgccaacccgaacgcgaaccccaacgccaaccccaacgccaacccgaacgccaaccccaacgccaaccccaacgcgaaccccaacgccaacccgaacgccaaccccaacgccaaccccaacgcgaaccccaacgccaacccgaacgccaaccccaacgccaaccccaacgccaaccccaacgcgaacccgaacgccaaccccgccgcguauaucaagcccggcuccgcgaacaagcccaaggacgagcuggacuacgccaacgacaucgaggcggccuacgccaaguucguggccgccuggacccugaaggcggccgccccggugacgaacauggagaacaucaccagcggcuuccuggggccccuccuggugcugcaggccggcuucuuccuccugacccgcauccugaccaucccgcagucccucgacagcugguggaccucccugaacuuccucgggggcagccccgucugccuggggcagaacucccagagccccaccuccaaccacagccccaccuccugcccgcccaucugccccggcuaccgguggaugugccugcgccgguucaucaucuuccuguucauccuccugcugugccucaucuuccugcuggugcuccuggacuaccagggcaugcugcccgugugcccgcucauccccgggagcacgaccaccaacaccggccccugcaagacgugcaccacccccgcccaggggaacuccauguucccgagcugcugcugcaccaagcccacggacggcaacugcacgugcauccccauccccuccagcugggcguucgccaaguaccugugggagugggccuccguccgcuucagcuggcugucccuccuggugccguucgugcagugguucgucgggcugagccccaccguguggcucuccgccaucuggaugaugugguacuggggccccagccuguacagcaucgugucccccuucaucccgcugcuccccaucuucuucugccugugggucuacaucugaggacuagucccuguucccagagcccacuuuuuuuucuuuuuuugaaauaaaauagccugucuuucagaucucaaaggcucuuuucagagccaccaaaaaaaaaaaaaaaaaaaaaaaaaaaaaaaaaaaaaaaaaaaaaaaaaaaaaaaaaaaaaaaaaaaaaaaaaaaaaaaaaaaaaaaaaaaaaaaaaaaaagaauu

SEQ ID NO: 9575 - RNA, 2219 nt, Artificial Sequence
  mRNA Design a-3 (hSL-A100-N5) comprising derived and/or modified sequence from Pf(3D7)__XP_001351122.1__HsALB_Pf-CSP(19-384)_L(PVTN)_HBsAg (opt1)
aggagagggcgcuuggcuugcaaggacccugagcugcggcauugaagcacacccaacccaacucgacugaagucagccucacugaaccggaucugagaaucuucucucucugggcuugccagggcucuccgaaccuagcuagcauccucuucaauuccaacuagaaagcuuaccaugaagugggugaccuucaucagccugcucuuccuguucuccagcgccuacucccuguuccaggaguaccagugcuacggcuccagcuccaacacccgggugcucaacgagcugaacuacgacaacgcggggaccaaccuguacaacgagcucgagaugaacuacuacggcaagcaggagaacugguacagccugaagaagaacucccgcagccugggggagaacgacgacggcaacaacgaggacaacgagaagcuccggaagcccaagcacaagaagcugaagcagccggccgacgggaaccccgaccccaacgccaaccccaacguggacccgaacgccaaccccaacgucgaccccaacgccaaccccaacguggacccgaacgcgaaccccaacgccaaccccaacgccaaccccaacgccaacccgaacgcgaaccccaacgccaaccccaacgccaaccccaacgccaacccgaacgccaaccccaacgcgaaccccaacgccaaccccaacgccaacccgaacgccaaccccaacgccaaccccaacgcgaaccccaacgccaacccgaacgccaaccccaacguggaccccaacgccaaccccaacgccaacccgaacgcgaaccccaacgccaaccccaacgccaacccgaacgccaaccccaacgccaaccccaacgcgaaccccaacgccaacccgaacgccaaccccaacgccaaccccaacgcgaaccccaacgccaacccgaacgccaaccccaacgccaaccccaacgccaaccccaacgcgaacccgaacgccaaccccaacaagaacaaccagggcaacggccaggggcacaacaugcccaacgaccccaaccgcaacgucgacgagaacgccaacgccaacuccgccgugaagaacaacaacaacgaggagccgagcgacaagcacaucaaggaguaccugaacaagauccagaacucccucagcacggaguggucccccugcagcgugaccugcggcaacgggauccagguccggaucaagcccggcuccgcgaacaagcccaaggacgagcuggacuacgccaacgacaucgagaagaagaucugcaagauggagaagugcagcuccguguucaacguggucaacagcuccccggugacgaacauggagaacaucaccagcggcuuccuggggccccuccuggugcugcaggccggcuucuuccuccugacccgcauccugaccaucccgcagucccucgacagcugguggaccucccugaacuuccucgggggcagccccgucugccuggggcagaacucccagagccccaccuccaaccacagccccaccuccugcccgcccaucugccccggcuaccgguggaugugccugcgccgguucaucaucuuccuguucauccuccugcugugccucaucuuccugcuggugcuccuggacuaccagggcaugcugcccgugugcccgcucauccccgggagcacgaccaccaacaccggccccugcaagacgugcaccacccccgcccaggggaacuccauguucccgagcugcugcugcaccaagcccacggacggcaacugcacgugcauccccauccccuccagcugggcguucgccaaguaccugugggagugggccuccguccgcuucagcuggcugucccuccuggugccguucgugcagugguucgucgggcugagccccaccguguggcucuccgccaucuggaugaugugguacuggggccccagccuguacagcaucgugucccccuucaucccgcugcuccccaucuucuucugccugugggucuacaucugaggacuagucccuguucccagagcccacuuuuuuuucuuuuuuugaaauaaaauagccugucuuucagaucucaaaggcucuuuucagagccaccaaaaaaaaaaaaaaaaaaaaaaaaaaaaaaaaaaaaaaaaaaaaaaaaaaaaaaaaaaaaaaaaaaaaaaaaaaaaaaaaaaaaaaaaaaaaaaaaaaaaagaauu

SEQ ID NO: 9576 - RNA, 2219 nt, Artificial Sequence
  mRNA Design a-3 (hSL-A100-N5) comprising derived and/or modified sequence from Pf(3D7)__XP_001351122.1__HsALB_Pf-CSP(19-384)_L(PVTN)_HBsAg (opt1)
aggagagggcgcuuggcuugcaaggacccugagcugcggcauugaagcacacccaacccaacucgacugaagucagccucacugaaccggaucugagaaucuucucucucugggcuugccagggcucuccgaaccuagcuagcauccucuucaauuccaacuagaaagcuuaccaugaagugggugaccuucaucagccuccuguuccuguucuccagcgccuacucccuguuccaggaguaccagugcuacggcuccagcuccaacacccgggugcucaacgagcugaacuacgacaacgcggggaccaaccuguacaacgagcucgagaugaacuacuacggcaagcaggagaacugguacagccugaagaagaacucccgcagccugggggagaacgacgacggcaacaacgaggacaacgagaagcuccggaagcccaagcacaagaagcugaagcagccggccgacgggaaccccgaccccaacgccaaccccaacguggacccgaacgccaaccccaacgucgaccccaacgccaaccccaacguggacccgaacgcgaaccccaacgccaaccccaacgccaaccccaacgccaacccgaacgcgaaccccaacgccaaccccaacgccaaccccaacgccaacccgaacgccaaccccaacgcgaaccccaacgccaaccccaacgccaacccgaacgccaaccccaacgccaaccccaacgcgaaccccaacgccaacccgaacgccaaccccaacguggaccccaacgccaaccccaacgccaacccgaacgcgaaccccaacgccaaccccaacgccaacccgaacgccaaccccaacgccaaccccaacgcgaaccccaacgccaacccgaacgccaaccccaacgccaaccccaacgcgaaccccaacgccaacccgaacgccaaccccaacgccaaccccaacgccaaccccaacgcgaacccgaacgccaaccccaacaagaacaaccagggcaacggccaggggcacaacaugcccaacgaccccaaccgcaacgucgacgagaacgccaacgccaacuccgccgugaagaacaacaacaacgaggagccgagcgacaagcacaucaaggaguaccugaacaagauccagaacucccucagcacggaguggucccccugcagcgugaccugcggcaacgggauccagguccggaucaagcccggcuccgcgaacaagcccaaggacgagcuggacuacgccaacgacaucgagaagaagaucugcaagauggagaagugcagcuccguguucaacguggucaacagcuccccggugacgaacauggagaacaucaccagcggcuuccuggggccccuccuggugcugcaggccggcuucuuccuccugacccgcauccugaccaucccgcagucccucgacagcugguggaccucccugaacuuccucgggggcagccccgucugccuggggcagaacucccagagccccaccuccaaccacagccccaccuccugcccgcccaucugccccggcuaccgguggaugugccugcgccgguucaucaucuuccuguucauccuccugcugugccucaucuuccugcuggugcuccuggacuaccagggcaugcugcccgugugcccgcucauccccgggagcacgaccaccaacaccggccccugcaagacgugcaccacccccgcccaggggaacuccauguucccgagcugcugcugcaccaagcccacggacggcaacugcacgugcauccccauccccuccagcugggcguucgccaaguaccugugggagugggccuccguccgcuucagcuggcugucccuccuggugccguucgugcagugguucgucgggcugagccccaccguguggcucuccgccaucuggaugaugugguacuggggccccagccuguacagcaucgugucccccuucaucccgcugcuccccaucuucuucugccugugggucuacaucugaggacuagucccuguucccagagcccacuuuuuuuucuuuuuuugaaauaaaauagccugucuuucagaucucaaaggcucuuuucagagccaccaaaaaaaaaaaaaaaaaaaaaaaaaaaaaaaaaaaaaaaaaaaaaaaaaaaaaaaaaaaaaaaaaaaaaaaaaaaaaaaaaaaaaaaaaaaaaaaaaaaaagaauu

SEQ ID NO: 9577 - RNA, 2036 nt, Artificial Sequence
  mRNA Design a-3 (hSL-A100-N5) comprising derived and/or modified sequence from Pf(3D7)__XP_001351122.1__HsALB_Pf-CSP(19-384)_L(SGG)_Ferritin (opt1)
aggagagggcgcuuggcuugcaaggacccugagcugcggcauugaagcacacccaacccaacucgacugaagucagccucacugaaccggaucugagaaucuucucucucugggcuugccagggcucuccgaaccuagcuagcauccucuucaauuccaacuagaaagcuuaccaugaagugggugaccuucaucagccugcucuuccuguucuccagcgccuacucccuguuccaggaguaccagugcuacggcuccagcuccaacacccgggugcucaacgagcugaacuacgacaacgcggggaccaaccuguacaacgagcucgagaugaacuacuacggcaagcaggagaacugguacagccugaagaagaacucccgcagccugggggagaacgacgacggcaacaacgaggacaacgagaagcuccggaagcccaagcacaagaagcugaagcagccggccgacgggaaccccgaccccaacgccaaccccaacguggacccgaacgccaaccccaacgucgaccccaacgccaaccccaacguggacccgaacgcgaaccccaacgccaaccccaacgccaaccccaacgccaacccgaacgcgaaccccaacgccaaccccaacgccaaccccaacgccaacccgaacgccaaccccaacgcgaaccccaacgccaaccccaacgccaacccgaacgccaaccccaacgccaaccccaacgcgaaccccaacgccaacccgaacgccaaccccaacguggaccccaacgccaaccccaacgccaacccgaacgcgaaccccaacgccaaccccaacgccaacccgaacgccaaccccaacgccaaccccaacgcgaaccccaacgccaacccgaacgccaaccccaacgccaaccccaacgcgaaccccaacgccaacccgaacgccaaccccaacgccaaccccaacgccaaccccaacgcgaacccgaacgccaaccccaacaagaacaaccagggcaacggccaggggcacaacaugcccaacgaccccaaccgcaacgucgacgagaacgccaacgccaacuccgccgugaagaacaacaacaacgaggagccgagcgacaagcacaucaaggaguaccugaacaagauccagaacucccucagcacggaguggucccccugcagcgugaccugcggcaacgggauccagguccggaucaagcccggcuccgcgaacaagcccaaggacgagcuggacuacgccaacgacaucgagaagaagaucugcaagauggagaagugcagcuccguguucaacguggucaacagcuccagcggcgggcugagcaaggacaucaucaagcuccugaacgagcaggugaacaaggagaugaacuccagcaaccuguacauguccaugagcuccuggugcuacacccacagccucgacggcgccgggcuguuccuguucgaccacgccgcggaggaguacgagcacgccaagaagcucaucaucuuccugaacgagaacaacguccccgugcagcugaccuccaucagcgccccggagcacaaguucgagggccucacgcagaucuuccagaaggccuacgagcacgagcagcacaucuccgagagcaucaacaacaucguggaccacgccaucaaguccaaggaccacgcgaccuucaacuuccugcagugguacgucgccgagcagcacgaggaggaggugcuguucaaggacauccucgacaagaucgagcugaucgggaacgagaaccacggccuguaccucgccgaccaguacgugaaggggaucgccaagagccgcaaguccugaggacuagucccuguucccagagcccacuuuuuuuucuuuuuuugaaauaaaauagccugucuuucagaucucaaaggcucuuuucagagccaccaaaaaaaaaaaaaaaaaaaaaaaaaaaaaaaaaaaaaaaaaaaaaaaaaaaaaaaaaaaaaaaaaaaaaaaaaaaaaaaaaaaaaaaaaaaaaaaaaaaaagaauu

SEQ ID NO: 9578 - RNA, 2036 nt, Artificial Sequence
  mRNA Design a-3 (hSL-A100-N5) comprising derived and/or modified sequence from Pf(3D7)__XP_001351122.1__HsALB_Pf-CSP(19-384)_L(SGG)_Ferritin (opt1)
aggagagggcgcuuggcuugcaaggacccugagcugcggcauugaagcacacccaacccaacucgacugaagucagccucacugaaccggaucugagaaucuucucucucugggcuugccagggcucuccgaaccuagcuagcauccucuucaauuccaacuagaaagcuuaccaugaagugggugaccuucaucagccuccuguuccuguucuccagcgccuacucccuguuccaggaguaccagugcuacggcuccagcuccaacacccgggugcucaacgagcugaacuacgacaacgcggggaccaaccuguacaacgagcucgagaugaacuacuacggcaagcaggagaacugguacagccugaagaagaacucccgcagccugggggagaacgacgacggcaacaacgaggacaacgagaagcuccggaagcccaagcacaagaagcugaagcagccggccgacgggaaccccgaccccaacgccaaccccaacguggacccgaacgccaaccccaacgucgaccccaacgccaaccccaacguggacccgaacgcgaaccccaacgccaaccccaacgccaaccccaacgccaacccgaacgcgaaccccaacgccaaccccaacgccaaccccaacgccaacccgaacgccaaccccaacgcgaaccccaacgccaaccccaacgccaacccgaacgccaaccccaacgccaaccccaacgcgaaccccaacgccaacccgaacgccaaccccaacguggaccccaacgccaaccccaacgccaacccgaacgcgaaccccaacgccaaccccaacgccaacccgaacgccaaccccaacgccaaccccaacgcgaaccccaacgccaacccgaacgccaaccccaacgccaaccccaacgcgaaccccaacgccaacccgaacgccaaccccaacgccaaccccaacgccaaccccaacgcgaacccgaacgccaaccccaacaagaacaaccagggcaacggccaggggcacaacaugcccaacgaccccaaccgcaacgucgacgagaacgccaacgccaacuccgccgugaagaacaacaacaacgaggagccgagcgacaagcacaucaaggaguaccugaacaagauccagaacucccucagcacggaguggucccccugcagcgugaccugcggcaacgggauccagguccggaucaagcccggcuccgcgaacaagcccaaggacgagcuggacuacgccaacgacaucgagaagaagaucugcaagauggagaagugcagcuccguguucaacguggucaacagcuccagcggcgggcugagcaaggacaucaucaagcuccugaacgagcaggugaacaaggagaugaacuccagcaaccuguacauguccaugagcuccuggugcuacacccacagccucgacggcgccgggcuguuccuguucgaccacgccgcggaggaguacgagcacgccaagaagcucaucaucuuccugaacgagaacaacguccccgugcagcugaccuccaucagcgccccggagcacaaguucgagggccucacgcagaucuuccagaaggccuacgagcacgagcagcacaucuccgagagcaucaacaacaucguggaccacgccaucaaguccaaggaccacgcgaccuucaacuuccugcagugguacgucgccgagcagcacgaggaggaggugcuguucaaggacauccucgacaagaucgagcugaucgggaacgagaaccacggccuguaccucgccgaccaguacgugaaggggaucgccaagagccgcaaguccugaggacuagucccuguucccagagcccacuuuuuuuucuuuuuuugaaauaaaauagccugucuuucagaucucaaaggcucuuuucagagccaccaaaaaaaaaaaaaaaaaaaaaaaaaaaaaaaaaaaaaaaaaaaaaaaaaaaaaaaaaaaaaaaaaaaaaaaaaaaaaaaaaaaaaaaaaaaaaaaaaaaaagaauu

SEQ ID NO: 9579 - RNA, 1997 nt, Artificial Sequence
  mRNA Design a-3 (hSL-A100-N5) comprising derived and/or modified sequence from Pf(3D7)__XP_001351122.1__HsALB_Pf-CSP(93-384)_L(PVTN)_HBsAg (opt1)
aggagagggcgcuuggcuugcaaggacccugagcugcggcauugaagcacacccaacccaacucgacugaagucagccucacugaaccggaucugagaaucuucucucucugggcuugccagggcucuccgaaccuagcuagcauccucuucaauuccaacuagaaagcuuaccaugaagugggugaccuucaucagccugcucuuccuguucuccagcgccuacuccaagcugaagcagccggccgacgggaaccccgaccccaacgccaaccccaacguggacccgaacgccaaccccaacgucgaccccaacgccaaccccaacguggacccgaacgcgaaccccaacgccaaccccaacgccaaccccaacgccaacccgaacgcgaaccccaacgccaaccccaacgccaaccccaacgccaacccgaacgccaaccccaacgcgaaccccaacgccaaccccaacgccaacccgaacgccaaccccaacgccaaccccaacgcgaaccccaacgccaacccgaacgccaaccccaacguggaccccaacgccaaccccaacgccaacccgaacgcgaaccccaacgccaaccccaacgccaacccgaacgccaaccccaacgccaaccccaacgcgaaccccaacgccaacccgaacgccaaccccaacgccaaccccaacgcgaaccccaacgccaacccgaacgccaaccccaacgccaaccccaacgccaaccccaacgcgaacccgaacgccaaccccaacaagaacaaccagggcaacggccaggggcacaacaugcccaacgaccccaaccgcaacgucgacgagaacgccaacgccaacuccgccgugaagaacaacaacaacgaggagccgagcgacaagcacaucaaggaguaccugaacaagauccagaacucccucagcacggaguggucccccugcagcgugaccugcggcaacgggauccagguccggaucaagcccggcuccgcgaacaagcccaaggacgagcuggacuacgccaacgacaucgagaagaagaucugcaagauggagaagugcagcuccguguucaacguggucaacagcuccccggugacgaacauggagaacaucaccagcggcuuccuggggccccuccuggugcugcaggccggcuucuuccuccugacccgcauccugaccaucccgcagucccucgacagcugguggaccucccugaacuuccucgggggcagccccgucugccuggggcagaacucccagagccccaccuccaaccacagccccaccuccugcccgcccaucugccccggcuaccgguggaugugccugcgccgguucaucaucuuccuguucauccuccugcugugccucaucuuccugcuggugcuccuggacuaccagggcaugcugcccgugugcccgcucauccccgggagcacgaccaccaacaccggccccugcaagacgugcaccacccccgcccaggggaacuccauguucccgagcugcugcugcaccaagcccacggacggcaacugcacgugcauccccauccccuccagcugggcguucgccaaguaccugugggagugggccuccguccgcuucagcuggcugucccuccuggugccguucgugcagugguucgucgggcugagccccaccguguggcucuccgccaucuggaugaugugguacuggggccccagccuguacagcaucgugucccccuucaucccgcugcuccccaucuucuucugccugugggucuacaucugaggacuagucccuguucccagagcccacuuuuuuuucuuuuuuugaaauaaaauagccugucuuucagaucucaaaggcucuuuucagagccaccaaaaaaaaaaaaaaaaaaaaaaaaaaaaaaaaaaaaaaaaaaaaaaaaaaaaaaaaaaaaaaaaaaaaaaaaaaaaaaaaaaaaaaaaaaaaaaaaaaaaagaauu

SEQ ID NO: 9580 - RNA, 1997 nt, Artificial Sequence
  mRNA Design a-3 (hSL-A100-N5) comprising derived and/or modified sequence from Pf(3D7)__XP_001351122.1__HsALB_Pf-CSP(93-384)_L(PVTN)_HBsAg (opt1)
aggagagggcgcuuggcuugcaaggacccugagcugcggcauugaagcacacccaacccaacucgacugaagucagccucacugaaccggaucugagaaucuucucucucugggcuugccagggcucuccgaaccuagcuagcauccucuucaauuccaacuagaaagcuuaccaugaagugggugaccuucaucagccuccuguuccuguucuccagcgccuacuccaagcugaagcagccggccgacgggaaccccgaccccaacgccaaccccaacguggacccgaacgccaaccccaacgucgaccccaacgccaaccccaacguggacccgaacgcgaaccccaacgccaaccccaacgccaaccccaacgccaacccgaacgcgaaccccaacgccaaccccaacgccaaccccaacgccaacccgaacgccaaccccaacgcgaaccccaacgccaaccccaacgccaacccgaacgccaaccccaacgccaaccccaacgcgaaccccaacgccaacccgaacgccaaccccaacguggaccccaacgccaaccccaacgccaacccgaacgcgaaccccaacgccaaccccaacgccaacccgaacgccaaccccaacgccaaccccaacgcgaaccccaacgccaacccgaacgccaaccccaacgccaaccccaacgcgaaccccaacgccaacccgaacgccaaccccaacgccaaccccaacgccaaccccaacgcgaacccgaacgccaaccccaacaagaacaaccagggcaacggccaggggcacaacaugcccaacgaccccaaccgcaacgucgacgagaacgccaacgccaacuccgccgugaagaacaacaacaacgaggagccgagcgacaagcacaucaaggaguaccugaacaagauccagaacucccucagcacggaguggucccccugcagcgugaccugcggcaacgggauccagguccggaucaagcccggcuccgcgaacaagcccaaggacgagcuggacuacgccaacgacaucgagaagaagaucugcaagauggagaagugcagcuccguguucaacguggucaacagcuccccggugacgaacauggagaacaucaccagcggcuuccuggggccccuccuggugcugcaggccggcuucuuccuccugacccgcauccugaccaucccgcagucccucgacagcugguggaccucccugaacuuccucgggggcagccccgucugccuggggcagaacucccagagccccaccuccaaccacagccccaccuccugcccgcccaucugccccggcuaccgguggaugugccugcgccgguucaucaucuuccuguucauccuccugcugugccucaucuuccugcuggugcuccuggacuaccagggcaugcugcccgugugcccgcucauccccgggagcacgaccaccaacaccggccccugcaagacgugcaccacccccgcccaggggaacuccauguucccgagcugcugcugcaccaagcccacggacggcaacugcacgugcauccccauccccuccagcugggcguucgccaaguaccugugggagugggccuccguccgcuucagcuggcugucccuccuggugccguucgugcagugguucgucgggcugagccccaccguguggcucuccgccaucuggaugaugugguacuggggccccagccuguacagcaucgugucccccuucaucccgcugcuccccaucuucuucugccugugggucuacaucugaggacuagucccuguucccagagcccacuuuuuuuucuuuuuuugaaauaaaauagccugucuuucagaucucaaaggcucuuuucagagccaccaaaaaaaaaaaaaaaaaaaaaaaaaaaaaaaaaaaaaaaaaaaaaaaaaaaaaaaaaaaaaaaaaaaaaaaaaaaaaaaaaaaaaaaaaaaaaaaaaaaaagaauu

SEQ ID NO: 9581 - RNA, 1658 nt, Artificial Sequence; identical to SEQ ID NO: 7559
  mRNA Design a-3 (hSL-A100-N5) comprising derived and/or modified sequence from Pf(3D7)__XP_001351122.1__HsALB_Pf-CSP(199-377)_L(PVTN)_HBsAg (opt1)

SEQ ID NO: 9582 - RNA, 1355 nt, Artificial Sequence
  mRNA Design a-3 (hSL-A100-N5) comprising derived and/or modified sequence from Pf(3D7)__XP_001351122.1__HsALB_Pf-CSP(19-272)_L(AAY)_Pf-CSP(310-3 27)_L(AAY)_Pf-CSP(346-375) (opt1)
aggagagggcgcuuggcuugcaaggacccugagcugcggcauugaagcacacccaacccaacucgacugaagucagccucacugaaccggaucugagaaucuucucucucugggcuugccagggcucuccgaaccuagcuagcauccucuucaauuccaacuagaaagcuuaccaugaagugggugaccuucaucagccuccuguuccuguucuccagcgccuacucccuguuccaggaguaccagugcuacggcuccagcuccaacacccgggugcucaacgagcugaacuacgacaacgcggggaccaaccuguacaacgagcucgagaugaacuacuacggcaagcaggagaacugguacagccugaagaagaacucccgcagccugggggagaacgacgacggcaacaacgaggacaacgagaagcuccggaagcccaagcacaagaagcugaagcagccggccgacgggaaccccgaccccaacgccaaccccaacguggacccgaacgccaaccccaacgucgaccccaacgccaaccccaacguggacccgaacgcgaaccccaacgccaaccccaacgccaaccccaacgccaacccgaacgcgaaccccaacgccaaccccaacgccaaccccaacgccaacccgaacgccaaccccaacgcgaaccccaacgccaaccccaacgccaacccgaacgccaaccccaacgccaaccccaacgcgaaccccaacgccaacccgaacgccaaccccaacguggaccccaacgccaaccccaacgccaacccgaacgcgaaccccaacgccaaccccaacgccaacccgaacgccaaccccaacgccaaccccaacgcgaaccccaacgccaacccgaacgccaaccccaacgccaaccccaacgcgaaccccaacgccaacccgaacgccaaccccaacgccaaccccaacgccaaccccaacgcgaacccgaacgccaaccccgccgcguaugagccgagcgacaagcacaucaaggaguaccugaacaagauccagaacucccucgcggccuacaucaagcccggcuccgcgaacaagcccaaggacgagcuggacuacgccaacgacaucgagaagaagaucugcaagauggagaagugcagcugaggacuagucccuguucccagagcccacuuuuuuuucuuuuuuugaaauaaaauagccugucuuucagaucucaaaggcucuuuucagagccaccaaaaaaaaaaaaaaaaaaaaaaaaaaaaaaaaaaaaaaaaaaaaaaaaaaaaaaaaaaaaaaaaaaaaaaaaaaaaaaaaaaaaaaaaaaaaaaaaaaaaagaauu

SEQ ID NO: 9583 - RNA, 1355 nt, Artificial Sequence
  mRNA Design a-3 (hSL-A100-N5) comprising derived and/or modified sequence from Pf(3D7)__XP_001351122.1__HsALB_Pf-CSP(19-272)_L(AAY)_Pf-CSP(346-3 75)_L(AAY)_Pf-CSP(310-327) (opt1)
aggagagggcgcuuggcuugcaaggacccugagcugcggcauugaagcacacccaacccaacucgacugaagucagccucacugaaccggaucugagaaucuucucucucugggcuugccagggcucuccgaaccuagcuagcauccucuucaauuccaacuagaaagcuuaccaugaagugggugaccuucaucagccuccuguuccuguucuccagcgccuacucccuguuccaggaguaccagugcuacggcuccagcuccaacacccgggugcucaacgagcugaacuacgacaacgcggggaccaaccuguacaacgagcucgagaugaacuacuacggcaagcaggagaacugguacagccugaagaagaacucccgcagccugggggagaacgacgacggcaacaacgaggacaacgagaagcuccggaagcccaagcacaagaagcugaagcagccggccgacgggaaccccgaccccaacgccaaccccaacguggacccgaacgccaaccccaacgucgaccccaacgccaaccccaacguggacccgaacgcgaaccccaacgccaaccccaacgccaaccccaacgccaacccgaacgcgaaccccaacgccaaccccaacgccaaccccaacgccaacccgaacgccaaccccaacgcgaaccccaacgccaaccccaacgccaacccgaacgccaaccccaacgccaaccccaacgcgaaccccaacgccaacccgaacgccaaccccaacguggaccccaacgccaaccccaacgccaacccgaacgcgaaccccaacgccaaccccaacgccaacccgaacgccaaccccaacgccaaccccaacgcgaaccccaacgccaacccgaacgccaaccccaacgccaaccccaacgcgaaccccaacgccaacccgaacgccaaccccaacgccaaccccaacgccaaccccaacgcgaacccgaacgccaaccccgcggccuacaucaagcccggcuccgcgaacaagcccaaggacgagcuggacuacgccaacgacaucgagaagaagaucugcaagauggagaagugcagcgccgcguaugagccgagcgacaagcacaucaaggaguaccugaacaagauccagaacucccucugaggacuagucccuguucccagagcccacuuuuuuuucuuuuuuugaaauaaaauagccugucuuucagaucucaaaggcucuuuucagagccaccaaaaaaaaaaaaaaaaaaaaaaaaaaaaaaaaaaaaaaaaaaaaaaaaaaaaaaaaaaaaaaaaaaaaaaaaaaaaaaaaaaaaaaaaaaaaaaaaaaaaagaauu

SEQ ID NO: 9584 - RNA, 1403 nt, Artificial Sequence
  mRNA Design a-3 (hSL-A100-N5) comprising derived and/or modified sequence from Pf(3D7)__XP_001351122.1__HsALB_Pf-CSP(19-272)_L(AAY)_Pf-CSP(346-3 75)_L(AAY)_Pf-CSP(310-327)_L(AAY)_PADRE (opt1)
aggagagggcgcuuggcuugcaaggacccugagcugcggcauugaagcacacccaacccaacucgacugaagucagccucacugaaccggaucugagaaucuucucucucugggcuugccagggcucuccgaaccuagcuagcauccucuucaauuccaacuagaaagcuuaccaugaagugggugaccuucaucagccuccuguuccuguucuccagcgccuacucccuguuccaggaguaccagugcuacggcuccagcuccaacacccgggugcucaacgagcugaacuacgacaacgcggggaccaaccuguacaacgagcucgagaugaacuacuacggcaagcaggagaacugguacagccugaagaagaacucccgcagccugggggagaacgacgacggcaacaacgaggacaacgagaagcuccggaagcccaagcacaagaagcugaagcagccggccgacgggaaccccgaccccaacgccaaccccaacguggacccgaacgccaaccccaacgucgaccccaacgccaaccccaacguggacccgaacgcgaaccccaacgccaaccccaacgccaaccccaacgccaacccgaacgcgaaccccaacgccaaccccaacgccaaccccaacgccaacccgaacgccaaccccaacgcgaaccccaacgccaaccccaacgccaacccgaacgccaaccccaacgccaaccccaacgcgaaccccaacgccaacccgaacgccaaccccaacguggaccccaacgccaaccccaacgccaacccgaacgcgaaccccaacgccaaccccaacgccaacccgaacgccaaccccaacgccaaccccaacgcgaaccccaacgccaacccgaacgccaaccccaacgccaaccccaacgcgaaccccaacgccaacccgaacgccaaccccaacgccaaccccaacgccaaccccaacgcgaacccgaacgccaaccccgccgcguauaucaagcccggcuccgcgaacaagcccaaggacgagcuggacuacgccaacgacaucgagaagaagaucugcaagauggagaagugcagcgcggccuacgagccgagcgacaagcacaucaaggaguaccugaacaagauccagaacucccucgccgccuacgccaaguucguggccgccuggacccugaaggcggccgccugaggacuagucccuguucccagagcccacuuuuuuuucuuuuuuugaaauaaaauagccugucuuucagaucucaaaggcucuuuucagagccaccaaaaaaaaaaaaaaaaaaaaaaaaaaaaaaaaaaaaaaaaaaaaaaaaaaaaaaaaaaaaaaaaaaaaaaaaaaaaaaaaaaaaaaaaaaaaaaaaaaaaagaauu

SEQ ID NO: 9585 - RNA, 1403 nt, Artificial Sequence
  mRNA Design a-3 (hSL-A100-N5) comprising derived and/or modified sequence from Pf(3D7)__XP_001351122.1__HsALB_Pf-CSP(19-272)_L(AAY)_Pf-CSP(310-3 27)_L(AAY)_Pf-CSP(346-375)_L(AAY)_PADRE (opt1)
aggagagggcgcuuggcuugcaaggacccugagcugcggcauugaagcacacccaacccaacucgacugaagucagccucacugaaccggaucugagaaucuucucucucugggcuugccagggcucuccgaaccuagcuagcauccucuucaauuccaacuagaaagcuuaccaugaagugggugaccuucaucagccuccuguuccuguucuccagcgccuacucccuguuccaggaguaccagugcuacggcuccagcuccaacacccgggugcucaacgagcugaacuacgacaacgcggggaccaaccuguacaacgagcucgagaugaacuacuacggcaagcaggagaacugguacagccugaagaagaacucccgcagccugggggagaacgacgacggcaacaacgaggacaacgagaagcuccggaagcccaagcacaagaagcugaagcagccggccgacgggaaccccgaccccaacgccaaccccaacguggacccgaacgccaaccccaacgucgaccccaacgccaaccccaacguggacccgaacgcgaaccccaacgccaaccccaacgccaaccccaacgccaacccgaacgcgaaccccaacgccaaccccaacgccaaccccaacgccaacccgaacgccaaccccaacgcgaaccccaacgccaaccccaacgccaacccgaacgccaaccccaacgccaaccccaacgcgaaccccaacgccaacccgaacgccaaccccaacguggaccccaacgccaaccccaacgccaacccgaacgcgaaccccaacgccaaccccaacgccaacccgaacgccaaccccaacgccaaccccaacgcgaaccccaacgccaacccgaacgccaaccccaacgccaaccccaacgcgaaccccaacgccaacccgaacgccaaccccaacgccaaccccaacgccaaccccaacgcgaacccgaacgccaaccccgccgcguaugagccgagcgacaagcacaucaaggaguaccugaacaagauccagaacucccucgcggccuacaucaagcccggcuccgcgaacaagcccaaggacgagcuggacuacgccaacgacaucgagaagaagaucugcaagauggagaagugcagcgccgccuacgccaaguucguggccgccuggacccugaaggcggccgccugaggacuagucccuguucccagagcccacuuuuuuuucuuuuuuugaaauaaaauagccugucuuucagaucucaaaggcucuuuucagagccaccaaaaaaaaaaaaaaaaaaaaaaaaaaaaaaaaaaaaaaaaaaaaaaaaaaaaaaaaaaaaaaaaaaaaaaaaaaaaaaaaaaaaaaaaaaaaaaaaaaaaagaauu

SEQ ID NO: 9586 - RNA, 1457 nt, Artificial Sequence
  mRNA Design a-3 (hSL-A100-N5) comprising derived and/or modified sequence from Pf(3D7)__XP_001351122.1__HsALB_Pf-CSP(19-272)_L(AAY)_Pf-CSP(310-3 27)_L(AAY)_Pf-CSP(346-375)_L(AAY)_PADRE_L(AAY)_P2 (opt1)
aggagagggcgcuuggcuugcaaggacccugagcugcggcauugaagcacacccaacccaacucgacugaagucagccucacugaaccggaucugagaaucuucucucucugggcuugccagggcucuccgaaccuagcuagcauccucuucaauuccaacuagaaagcuuaccaugaagugggugaccuucaucagccuccuguuccuguucuccagcgccuacucccuguuccaggaguaccagugcuacggcuccagcuccaacacccgggugcucaacgagcugaacuacgacaacgcggggaccaaccuguacaacgagcucgagaugaacuacuacggcaagcaggagaacugguacagccugaagaagaacucccgcagccugggggagaacgacgacggcaacaacgaggacaacgagaagcuccggaagcccaagcacaagaagcugaagcagccggccgacgggaaccccgaccccaacgccaaccccaacguggacccgaacgccaaccccaacgucgaccccaacgccaaccccaacguggacccgaacgcgaaccccaacgccaaccccaacgccaaccccaacgccaacccgaacgcgaaccccaacgccaaccccaacgccaaccccaacgccaacccgaacgccaaccccaacgcgaaccccaacgccaaccccaacgccaacccgaacgccaaccccaacgccaaccccaacgcgaaccccaacgccaacccgaacgccaaccccaacguggaccccaacgccaaccccaacgccaacccgaacgcgaaccccaacgccaaccccaacgccaacccgaacgccaaccccaacgccaaccccaacgcgaaccccaacgccaacccgaacgccaaccccaacgccaaccccaacgcgaaccccaacgccaacccgaacgccaaccccaacgccaaccccaacgccaaccccaacgcgaacccgaacgccaaccccgcggccuacgagccgagcgacaagcacaucaaggaguaccugaacaagauccagaacucccucgccgcguauaucaagcccggcuccgcgaacaagcccaaggacgagcuggacuacgccaacgacaucgagaagaagaucugcaagauggagaagugcagcgccgccuacgccaaguucguggccgccuggacccugaaggcggccgccgccgcuuaccaguacaucaaggccaacagcaaguucaucggcaucaccgagcugugaggacuagucccuguucccagagcccacuuuuuuuucuuuuuuugaaauaaaauagccugucuuucagaucucaaaggcucuuuucagagccaccaaaaaaaaaaaaaaaaaaaaaaaaaaaaaaaaaaaaaaaaaaaaaaaaaaaaaaaaaaaaaaaaaaaaaaaaaaaaaaaaaaaaaaaaaaaaaaaaaaaaagaauu

SEQ ID NO: 9587 - RNA, 1421 nt, Artificial Sequence
  mRNA Design a-3 (hSL-A100-N5) comprising derived and/or modified sequence from Pf(3D7)__XP_001351122.1__HsALB_Pf-CSP(19-272)_L(AAY)_Pf-CSP(310-3 27)_Linker (AAY)_Pf-CSP(346-397) (opt1)
aggagagggcgcuuggcuugcaaggacccugagcugcggcauugaagcacacccaacccaacucgacugaagucagccucacugaaccggaucugagaaucuucucucucugggcuugccagggcucuccgaaccuagcuagcauccucuucaauuccaacuagaaagcuuaccaugaagugggugaccuucaucagccuccuguuccuguucuccagcgccuacucccuguuccaggaguaccagugcuacggcuccagcuccaacacccgggugcucaacgagcugaacuacgacaacgcggggaccaaccuguacaacgagcucgagaugaacuacuacggcaagcaggagaacugguacagccugaagaagaacucccgcagccugggggagaacgacgacggcaacaacgaggacaacgagaagcuccggaagcccaagcacaagaagcugaagcagccggccgacgggaaccccgaccccaacgccaaccccaacguggacccgaacgccaaccccaacgucgaccccaacgccaaccccaacguggacccgaacgcgaaccccaacgccaaccccaacgccaaccccaacgccaacccgaacgcgaaccccaacgccaaccccaacgccaaccccaacgccaacccgaacgccaaccccaacgcgaaccccaacgccaaccccaacgccaacccgaacgccaaccccaacgccaaccccaacgcgaaccccaacgccaacccgaacgccaaccccaacguggaccccaacgccaaccccaacgccaacccgaacgcgaaccccaacgccaaccccaacgccaacccgaacgccaaccccaacgccaaccccaacgcgaaccccaacgccaacccgaacgccaaccccaacgccaaccccaacgcgaaccccaacgccaacccgaacgccaaccccaacgccaaccccaacgccaaccccaacgcgaacccgaacgccaaccccgcggccuacgagccgagcgacaagcacaucaaggaguaccugaacaagauccagaacucccucgccgcguauaucaagcccggcuccgcgaacaagcccaaggacgagcuggacuacgccaacgacaucgagaagaagaucugcaagauggagaagugcagcuccguguucaacguggucaacagcuccaucgggcugaucauggugcucagcuuccuguuccugaacugaggacuagucccuguucccagagcccacuuuuuuuucuuuuuuugaaauaaaauagccugucuuucagaucucaaaggcucuuuucagagccaccaaaaaaaaaaaaaaaaaaaaaaaaaaaaaaaaaaaaaaaaaaaaaaaaaaaaaaaaaaaaaaaaaaaaaaaaaaaaaaaaaaaaaaaaaaaaaaaaaaaaagaauu

SEQ ID NO: 9588 - RNA, 2021 nt, Artificial Sequence
  mRNA Design a-3 (hSL-A100-N5) comprising derived and/or modified sequence from Pf(3D7)__XP_001351122.1__LumSynt_L(GGS4-GGG)_Pf-CSP(19-397) (opt1)
aggagagggcgcuuggcuugcaaggacccugagcugcggcauugaagcacacccaacccaacucgacugaagucagccucacugaaccggaucugagaaucuucucucucugggcuugccagggcucuccgaaccuagcuagcauccucuucaauuccaacuagaaagcuuaccaugcagaucuacgagggcaagcugaccgccgaggggcuccgcuucggcaucguggccagccgguucaaccacgcgcuggucgaccgccugguggagggggccaucgacgccaucgugcggcacggcgggcgcgaggaggacaucacccucguccgggugcccggcuccugggagaucccgguggccgccggcgagcuggcgcgcaaggaggacaucgacgccgucaucgccaucggggugcugauccggggcgccacgccccacuucgacuacaucgcgagcgagguguccaaggggcucgccgaccugagccuggagcuccgcaagcccaucaccuucggcgucaucaccgccgacacccuggagcaggccaucgagcgggccgggacgaagcacggcaacaagggcugggaggcggcccuguccgccaucgagauggccaaccucuucaagagccugcgcgggggcuccgggggcagcggcggguccggcgggagcggcgggggccuguuccaggaguaccagugcuacggcuccagcuccaacacccgggugcucaacgagcugaacuacgacaacgccgggaccaaccuguacaacgagcucgagaugaacuacuacggcaagcaggagaacugguacagccugaagaagaacucccgcagccugggggagaacgacgacggcaacaacgaggacaacgagaagcuccggaagcccaagcacaagaagcugaagcagccggcggacgggaaccccgaccccaacgccaaccccaacguggacccgaacgccaaccccaacgucgaccccaacgccaaccccaacguggacccgaacgccaaccccaacgcgaaccccaacgccaaccccaacgccaacccgaacgccaaccccaacgccaaccccaacgcgaaccccaacgccaacccgaacgccaaccccaacgccaaccccaacgcgaaccccaacgccaacccgaacgccaaccccaacgccaaccccaacgccaaccccaacgcgaacccgaacgccaaccccaacguggaccccaacgccaacccgaacgccaaccccaacgccaaccccaacgcgaaccccaacgccaacccgaacgccaaccccaacgccaaccccaacgccaaccccaacgcgaacccgaacgccaaccccaacgccaaccccaacgccaaccccaacgcgaacccgaacgccaaccccaacgccaaccccaacgccaaccccaacgccaacccgaacgcgaaccccaacaagaacaaccagggcaacggccaggggcacaacaugcccaacgaccccaaccgcaacgucgacgagaacgccaacgccaacuccgccgugaagaacaacaacaacgaggagccgagcgacaagcacaucaaggaguaccugaacaagauccagaacucccucagcaccgaguggagccccugcuccgugacgugcggcaacgggauccagguccggaucaagcccggcagcgccaacaagcccaaggacgagcuggacuacgcgaacgacaucgagaagaagaucugcaagauggagaagugcuccagcguguucaacguggucaacuccagcaucgggcugaucauggugcucuccuuccuguuccugaacugaggacuagucccuguucccagagcccacuuuuuuuucuuuuuuugaaauaaaauagccugucuuucagaucucaaaggcucuuuucagagccaccaaaaaaaaaaaaaaaaaaaaaaaaaaaaaaaaaaaaaaaaaaaaaaaaaaaaaaaaaaaaaaaaaaaaaaaaaaaaaaaaaaaaaaaaaaaaaaaaaaaaagaauu

SEQ ID NO: 9589 - RNA, 1883 nt, Artificial Sequence
  mRNA Design a-3 (hSL-A100-N5) comprising derived and/or modified sequence from Pf(3D7)__XP_001351122.1__HsALB_Pf-CSP(19-272)_L(PVTN)_HBsAg (opt1)
aggagagggcgcuuggcuugcaaggacccugagcugcggcauugaagcacacccaacccaacucgacugaagucagccucacugaaccggaucugagaaucuucucucucugggcuugccagggcucuccgaaccuagcuagcauccucuucaauuccaacuagaaagcuuaccaugaagugggugaccuucaucagccuccuguuccuguucuccagcgccuacucccuguuccaggaguaccagugcuacggcagcuccagcaacacccgcguccucaacgagcugaacuacgacaacgccgggaccaaccuguacaacgagcucgagaugaacuacuacggcaagcaggagaacugguacucccugaagaagaacagccggucccugggggagaacgacgacggcaacaacgaggacaacgagaagcuccgcaagcccaagcacaagaagcugaagcagccggcggacgggaaccccgaccccaacgccaaccccaacguggacccgaacgccaaccccaacguggaccccaacgccaaccccaacgucgacccgaacgccaaccccaacgcgaaccccaacgccaaccccaacgccaacccgaacgccaaccccaacgcgaaccccaacgccaaccccaacgccaacccgaacgccaaccccaacgccaaccccaacgcgaaccccaacgccaacccgaacgccaaccccaacgccaaccccaacgccaaccccaacgcgaacccgaacgccaaccccaacguggaccccaacgccaaccccaacgccaacccgaacgccaaccccaacgcgaaccccaacgccaacccgaacgccaaccccaacgccaaccccaacgccaaccccaacgcgaacccgaacgccaaccccaacgccaaccccaacgccaaccccaacgcgaacccgaacgccaaccccaacgccaaccccaacgccaaccccaacgccaacccgaacgcgaacccgcccgugaccaacauggagaacaucaccagcggcuuccugggcccccuccugguccugcaggccggguucuuccuccugacccggauccugacgaucccccagucccucgacagcugguggaccucccugaacuuccugggcgggagccccgugugccucggccagaacucccagagccccaccuccaaccacagccccaccuccugcccgcccaucugccccggguaccgcuggaugugccugcggcgcuucaucaucuuccuguucauccuccugcugugccucaucuuccugcuggugcuccuggacuaccagggcaugcugcccgucugcccgcucauccccggcagcacgaccaccaacaccgggcccugcaagacgugcaccaccccggcccagggcaacagcauguuccccuccugcugcugcaccaagcccacggacgggaacugcacgugcauccccaucccgagcuccugggccuucgccaaguaccugugggagugggcgagcgugcgguucuccuggcugagccuccuggugcccuucguccagugguucgugggccugucccccaccguguggcucagcgccaucuggaugaugugguacuggggccccucccuguacagcaucgucuccccguucaucccccugcuccccaucuucuucugccuguggguguacaucugaggacuagucccuguucccagagcccacuuuuuuuucuuuuuuugaaauaaaauagccugucuuucagaucucaaaggcucuuuucagagccaccaaaaaaaaaaaaaaaaaaaaaaaaaaaaaaaaaaaaaaaaaaaaaaaaaaaaaaaaaaaaaaaaaaaaaaaaaaaaaaaaaaaaaaaaaaaaaaaaaaaaagaauu

SEQ ID NO: 9590 - RNA, 2000 nt, Artificial Sequence
  mRNA Design a-3 (hSL-A100-N5) comprising derived and/or modified sequence from Pf(3D7)__XP_001351122.1__HsALB_Pf-CSP(19-272)_L(AAY)_Pf-CSP(346-3 65)_L(AAY)_PADRE_L(PVTN)_HBsAg (opt1)
aggagagggcgcuuggcuugcaaggacccugagcugcggcauugaagcacacccaacccaacucgacugaagucagccucacugaaccggaucugagaaucuucucucucugggcuugccagggcucuccgaaccuagcuagcauccucuucaauuccaacuagaaagcuuaccaugaagugggugaccuucaucagccugcuguuccuguucuccagcgccuacucccuguuccaggaguaccagugcuacggcagcuccagcaacacccgcguccucaacgagcugaacuacgacaacgccgggaccaaccuguacaacgagcucgagaugaacuacuacggcaagcaggagaacugguacucccugaagaagaacagccggucccugggggagaacgacgacggcaacaacgaggacaacgagaagcuccgcaagcccaagcacaagaagcugaagcagccggcggacgggaaccccgaccccaacgccaaccccaacguggacccgaacgccaaccccaacguggaccccaacgccaaccccaacgucgacccgaacgccaaccccaacgcgaaccccaacgccaaccccaacgccaacccgaacgccaaccccaacgcgaaccccaacgccaaccccaacgccaacccgaacgccaaccccaacgccaaccccaacgcgaaccccaacgccaacccgaacgccaaccccaacgccaaccccaacgccaaccccaacgcgaacccgaacgccaaccccaacguggaccccaacgccaaccccaacgccaacccgaacgccaaccccaacgcgaaccccaacgccaacccgaacgccaaccccaacgccaaccccaacgccaaccccaacgcgaacccgaacgccaaccccaacgccaaccccaacgccaaccccaacgcgaacccgaacgccaaccccaacgccaaccccaacgccaaccccaacgccaacccgaacgcgaaccccgccgccuacaucaagcccggcagcgccaacaagcccaaggacgagcuggacuacgccaacgacaucgaggcggccuacgccaaguucguggccgccuggacccucaaggcggccgccccggucaccaacauggagaacaucaccuccggcuuccuggggccccugcucgugcugcaggccggcuucuuccugcucacgcggauccugaccaucccccagagccuggacuccugguggaccagccucaacuuccucgggggcucccccgugugccuggggcagaacagccaguccccgaccagcaaccacucccccacgagcugcccgcccaucugccccggcuaccgcuggaugugccuccggcgcuucaucaucuuccuguucauccugcuccugugccugaucuuccuccugguccugcucgacuaccagggcaugcugcccgugugcccccugaucccggggagcaccaccaccaacacgggccccugcaagaccugcaccacccccgcgcaggggaacuccauguuccccagcugcugcugcacgaagccgaccgacggcaacugcacgugcauccccauccccuccagcugggccuucgccaaguaccucugggagugggccuccgugcgguucagcuggcugucccugcucguccccuucgugcagugguucgugggccugagcccgaccgucuggcuguccgccaucuggaugaugugguacugggggcccagccucuacuccaucgugagccccuucaucccccugcugccgaucuucuucugccucuggguguacaucugaggacuagucccuguucccagagcccacuuuuuuuucuuuuuuugaaauaaaauagccugucuuucagaucucaaaggcucuuuucagagccaccaaaaaaaaaaaaaaaaaaaaaaaaaaaaaaaaaaaaaaaaaaaaaaaaaaaaaaaaaaaaaaaaaaaaaaaaaaaaaaaaaaaaaaaaaaaaaaaaaaaaagaauu

SEQ ID NO: 9591 - RNA, 2219 nt, Artificial Sequence
  mRNA Design a-3 (hSL-A100-N5) comprising derived and/or modified sequence from Pf(3D7)__XP_001351122.1__HsALB_Pf-CSP(19-384)_L(PVTN)_HBsAg (opt1)
aggagagggcgcuuggcuugcaaggacccugagcugcggcauugaagcacacccaacccaacucgacugaagucagccucacugaaccggaucugagaaucuucucucucugggcuugccagggcucuccgaaccuagcuagcauccucuucaauuccaacuagaaagcuuaccaugaagugggugaccuucaucagccugcuguuccuguucuccagcgccuacucccuguuccaggaguaccagugcuacggcagcuccagcaacacccgcguccucaacgagcugaacuacgacaacgccgggacgaaccuguacaacgagcucgagaugaacuacuacggcaagcaggagaacugguacucccugaagaagaacagccggucccugggggagaacgacgacggcaacaacgaggacaacgagaagcuccgcaagcccaagcacaagaagcugaagcagccggcggacgggaaccccgaccccaacgccaaccccaacguggacccgaacgccaaccccaacguggaccccaacgccaaccccaacgucgacccgaacgccaaccccaacgcgaaccccaacgccaaccccaacgccaacccgaacgccaaccccaacgcgaaccccaacgccaaccccaacgccaacccgaacgccaaccccaacgccaaccccaacgcgaaccccaacgccaacccgaacgccaaccccaacgccaaccccaacgccaaccccaacgcgaacccgaacgccaaccccaacguggaccccaacgccaaccccaacgccaacccgaacgccaaccccaacgcgaaccccaacgccaacccgaacgccaaccccaacgccaaccccaacgccaaccccaacgcgaacccgaacgccaaccccaacgccaaccccaacgccaaccccaacgcgaacccgaacgccaaccccaacgccaaccccaacgccaaccccaacgccaacccgaacgcgaaccccaacaagaacaaccagggcaacggccaggggcacaacaugcccaacgaccccaaccggaacguggacgagaacgccaacgccaacagcgccgucaagaacaacaacaacgaggagccguccgacaagcacaucaaggaguaccugaacaagauccagaacagccucuccaccgaguggagccccugcuccgugaccugcggcaacgggauccaggugcgcaucaagcccggcagcgccaacaagcccaaggacgagcuggacuacgcgaacgacaucgagaagaagaucugcaagauggagaagugcuccagcgucuucaacguggugaacuccagcccggucaccaacauggagaacaucacgagcggguuccugggcccccuccuggugcugcaggccggcuucuuccuccugacccggauccugaccaucccccagucccucgacagcugguggaccucccugaacuuccucgggggcagccccgugugccucgggcagaacucccagagcccgacguccaaccacagccccaccuccugcccgcccaucugccccggcuaccgcuggaugugccugcggcgcuucaucaucuuccuguucauccuccugcugugccucaucuuccugcugguccuccuggacuaccagggcaugcugcccgugugcccccucaucccggggagcaccaccacgaacaccggccccugcaagaccugcaccacgcccgcccaggggaacuccauguuccccagcugcugcugcaccaagccgaccgacggcaacugcacgugcauccccauccccuccagcugggccuucgccaaguaccugugggagugggcguccgugcgguucagcuggcugucccuccugguccccuucgugcagugguucguggggcugagcccgaccgucuggcucuccgccaucuggaugaugugguacuggggccccagccuguacagcaucgugucccccuucaucccccugcucccgaucuucuucugccuguggguguacaucugaggacuagucccuguucccagagcccacuuuuuuuucuuuuuuugaaauaaaauagccugucuuucagaucucaaaggcucuuuucagagccaccaaaaaaaaaaaaaaaaaaaaaaaaaaaaaaaaaaaaaaaaaaaaaaaaaaaaaaaaaaaaaaaaaaaaaaaaaaaaaaaaaaaaaaaaaaaaaaaaaaaaagaauu

SEQ ID NO: 9592 - RNA, 2036 nt, Artificial Sequence
  mRNA Design a-3 (hSL-A100-N5) comprising derived and/or modified sequence from Pf(3D7)__XP_001351122.1__HsALB_Pf-CSP(19-384)_L(SGG)_Ferritin (opt1)
aggagagggcgcuuggcuugcaaggacccugagcugcggcauugaagcacacccaacccaacucgacugaagucagccucacugaaccggaucugagaaucuucucucucugggcuugccagggcucuccgaaccuagcuagcauccucuucaauuccaacuagaaagcuuaccaugaagugggugaccuucaucagccuccuguuccuguucuccagcgccuacucccuguuccaggaguaccagugcuacggcagcuccagcaacacccggguccucaacgagcugaacuacgacaacgccgggacgaaccuguacaacgagcucgagaugaacuacuacggcaagcaggagaacugguacucccugaagaagaacagccggucccugggggagaacgacgacggcaacaacgaggacaacgagaagcuccgcaagcccaagcacaagaagcugaagcagccggcggacgggaaccccgaccccaacgccaaccccaacguggacccgaacgccaaccccaacguggaccccaacgccaaccccaacgucgacccgaacgccaaccccaacgcgaaccccaacgccaaccccaacgccaacccgaacgccaaccccaacgcgaaccccaacgccaaccccaacgccaacccgaacgccaaccccaacgccaaccccaacgcgaaccccaacgccaacccgaacgccaaccccaacgccaaccccaacgccaaccccaacgcgaacccgaacgccaaccccaacguggaccccaacgccaaccccaacgccaacccgaacgccaaccccaacgcgaaccccaacgccaacccgaacgccaaccccaacgccaaccccaacgccaaccccaacgcgaacccgaacgccaaccccaacgccaaccccaacgccaaccccaacgcgaacccgaacgccaaccccaacgccaaccccaacgccaaccccaacgccaacccgaacgcgaaccccaacaagaacaaccagggcaacggccaggggcacaacaugcccaacgaccccaaccggaacguggacgagaacgccaacgccaacagcgccgucaagaacaacaacaacgaggagccguccgacaagcacaucaaggaguaccugaacaagauccagaacagccucuccaccgaguggagccccugcuccgugaccugcggcaacgggauccaggugcgcaucaagcccggcagcgccaacaagcccaaggacgagcuggacuacgcgaacgacaucgagaagaagaucugcaagauggagaagugcuccagcgucuucaacguggugaacuccagcagcgggggccuguccaaggacaucaucaagcuccugaacgagcaggucaacaaggagaugaacagcuccaaccuguacaugagcauguccagcuggugcuacacccacucccucgacggcgccgggcuguuccuguucgaccacgccgccgaggaguacgagcacgccaagaagcucaucaucuuccugaacgagaacaacgugccggugcagcugacgagcaucuccgcgcccgagcacaaguucgagggccucacccagaucuuccagaaggccuacgagcacgagcagcacaucagcgaguccaucaacaacaucgucgaccacgccaucaagagcaaggaccacgccaccuucaacuuccugcagugguacguggcggagcagcacgaggaggaggugcuguucaaggacauccucgacaagaucgagcugaucgggaacgagaaccacggccuguaccucgccgaccaguacgucaagggcaucgccaagucccgcaagagcugaggacuagucccuguucccagagcccacuuuuuuuucuuuuuuugaaauaaaauagccugucuuucagaucucaaaggcucuuuucagagccaccaaaaaaaaaaaaaaaaaaaaaaaaaaaaaaaaaaaaaaaaaaaaaaaaaaaaaaaaaaaaaaaaaaaaaaaaaaaaaaaaaaaaaaaaaaaaaaaaaaaaagaauu

SEQ ID NO: 9593 - RNA, 1997 nt, Artificial Sequence
  mRNA Design a-3 (hSL-A100-N5) comprising derived and/or modified sequence from Pf(3D7)__XP_001351122.1__HsALB_Pf-CSP(93-384)_L(PVTN)_HBsAg (opt1)
aggagagggcgcuuggcuugcaaggacccugagcugcggcauugaagcacacccaacccaacucgacugaagucagccucacugaaccggaucugagaaucuucucucucugggcuugccagggcucuccgaaccuagcuagcauccucuucaauuccaacuagaaagcuuaccaugaagugggugaccuucaucagccuccuguuccuguucuccagcgccuacuccaagcugaagcagcccgccgacggcaacccggaccccaacgcgaaccccaacgucgaccccaacgccaacccgaacguggaccccaacgccaaccccaacguggaccccaacgccaacccgaacgccaaccccaacgcgaaccccaacgccaaccccaacgccaacccgaacgccaaccccaacgcgaaccccaacgccaaccccaacgccaacccgaacgccaaccccaacgccaaccccaacgcgaaccccaacgccaacccgaacgccaaccccaacgccaaccccaacgccaaccccaacgcgaacccgaacgucgaccccaacgccaaccccaacgccaaccccaacgccaacccgaacgccaaccccaacgcgaaccccaacgccaacccgaacgccaaccccaacgccaaccccaacgccaaccccaacgcgaacccgaacgccaaccccaacgccaaccccaacgccaaccccaacgcgaacccgaacgccaaccccaacgccaaccccaacgccaaccccaacgccaacccgaacaagaacaaccaggggaacggccaggggcacaacaugcccaacgaccccaaccgcaacguggacgagaacgcgaacgccaacagcgccgugaagaacaacaacaacgaggagcccuccgacaagcacaucaaggaguaccucaacaagauccagaacagccuguccaccgaguggagcccgugcuccgugaccugcggcaacgggauccagguccggaucaagcccggcagcgccaacaagcccaaggacgagcuggacuacgccaacgacaucgagaagaagaucugcaagauggagaagugcuccagcguguucaacgucgugaacuccagccccgugaccaacauggagaacaucaccuccggcuuccucgggccgcugcugguccuccaggcgggcuucuuccugcugacccgcauccucacgaucccccagagccuggacuccugguggaccagccugaacuuccucgggggcucccccgugugccuggggcagaacagccagagccccaccuccaaccacagcccgaccuccugcccgcccaucugccccggcuaccgguggaugugccugcgccgguucaucaucuuccucuucauccugcugcucugccugaucuuccugcucgugcugcuggacuaccagggcaugcuccccgucugcccccugauccccgggagcacgaccaccaacaccggcccgugcaagacgugcaccacccccgcccaggggaacuccauguuccccagcugcugcugcaccaagcccacggacggcaacugcacgugcaucccgauccccuccagcugggccuucgccaaguaccugugggagugggccuccgugcgcuucagcuggcucucccugcuggugcccuucguccagugguucgugggccucagccccaccguguggcuguccgcgaucuggaugaugugguacugggggccgagccuguacuccaucgucagccccuucaucccccuccugcccaucuucuucugccuguggguguacaucugaggacuagucccuguucccagagcccacuuuuuuuucuuuuuuugaaauaaaauagccugucuuucagaucucaaaggcucuuuucagagccaccaaaaaaaaaaaaaaaaaaaaaaaaaaaaaaaaaaaaaaaaaaaaaaaaaaaaaaaaaaaaaaaaaaaaaaaaaaaaaaaaaaaaaaaaaaaaaaaaaaaaagaauu

SEQ ID NO: 9594 - RNA, 1658 nt, Artificial Sequence; identical to SEQ ID NO: 7589
  mRNA Design a-3 (hSL-A100-N5) comprising derived and/or modified sequence from Pf(3D7)__XP_001351122.1__HsALB_Pf-CSP(199-377)_L(PVTN)_HBsAg (opt1)

SEQ ID NO: 9595 - RNA, 1355 nt, Artificial Sequence
  mRNA Design a-3 (hSL-A100-N5) comprising derived and/or modified sequence from Pf(3D7)__XP_001351122.1__HsALB_Pf-CSP(19-272)_L(AAY)_Pf-CSP(346-3 75)_L(AAY)_Pf-CSP(310-327) (opt1)
aggagagggcgcuuggcuugcaaggacccugagcugcggcauugaagcacacccaacccaacucgacugaagucagccucacugaaccggaucugagaaucuucucucucugggcuugccagggcucuccgaaccuagcuagcauccucuucaauuccaacuagaaagcuuaccaugaagugggugaccuucaucagccuccuguuccuguucuccagcgccuacucccuguuccaggaguaccagugcuacggcagcuccagcaacacccgcguccucaacgagcugaacuacgacaacgccgggacgaaccuguacaacgagcucgagaugaacuacuacggcaagcaggagaacugguacucccugaagaagaacagccggucccugggggagaacgacgacggcaacaacgaggacaacgagaagcuccgcaagcccaagcacaagaagcugaagcagccggcggacgggaaccccgaccccaacgccaaccccaacguggacccgaacgccaaccccaacguggaccccaacgccaaccccaacgucgacccgaacgccaaccccaacgcgaaccccaacgccaaccccaacgccaacccgaacgccaaccccaacgcgaaccccaacgccaaccccaacgccaacccgaacgccaaccccaacgccaaccccaacgcgaaccccaacgccaacccgaacgccaaccccaacgccaaccccaacgccaaccccaacgcgaacccgaacgccaaccccaacguggaccccaacgccaaccccaacgccaacccgaacgccaaccccaacgcgaaccccaacgccaacccgaacgccaaccccaacgccaaccccaacgccaaccccaacgcgaacccgaacgccaaccccaacgccaaccccaacgccaaccccaacgcgaacccgaacgccaaccccaacgccaaccccaacgccaaccccaacgccaacccgaacgcgaaccccgccgccuacaucaagcccggcagcgccaacaagcccaaggacgagcuggacuacgccaacgacaucgagaagaagaucugcaagauggagaagugcuccgcggccuacgagccgagcgacaagcacaucaaggaguaccucaacaagauccagaacucccugugaggacuagucccuguucccagagcccacuuuuuuuucuuuuuuugaaauaaaauagccugucuuucagaucucaaaggcucuuuucagagccaccaaaaaaaaaaaaaaaaaaaaaaaaaaaaaaaaaaaaaaaaaaaaaaaaaaaaaaaaaaaaaaaaaaaaaaaaaaaaaaaaaaaaaaaaaaaaaaaaaaaaagaauu

SEQ ID NO: 9596 - RNA, 1403 nt, Artificial Sequence
  mRNA Design a-3 (hSL-A100-N5) comprising derived and/or modified sequence from Pf(3D7)__XP_001351122.1__HsALB_Pf-CSP(19-272)_L(AAY)_Pf-CSP(346-3 75)_L(AAY)_Pf-CSP(310-327)_L(AAY)_PADRE (opt1)
aggagagggcgcuuggcuugcaaggacccugagcugcggcauugaagcacacccaacccaacucgacugaagucagccucacugaaccggaucugagaaucuucucucucugggcuugccagggcucuccgaaccuagcuagcauccucuucaauuccaacuagaaagcuuaccaugaagugggugaccuucaucagccuccuguuccuguucuccagcgccuacucccuguuccaggaguaccagugcuacggcagcuccagcaacacccgcguccucaacgagcugaacuacgacaacgccgggacgaaccuguacaacgagcucgagaugaacuacuacggcaagcaggagaacugguacucccugaagaagaacagccggucccugggggagaacgacgacggcaacaacgaggacaacgagaagcuccgcaagcccaagcacaagaagcugaagcagccggcggacgggaaccccgaccccaacgccaaccccaacguggacccgaacgccaaccccaacguggaccccaacgccaaccccaacgucgacccgaacgccaaccccaacgcgaaccccaacgccaaccccaacgccaacccgaacgccaaccccaacgcgaaccccaacgccaaccccaacgccaacccgaacgccaaccccaacgccaaccccaacgcgaaccccaacgccaacccgaacgccaaccccaacgccaaccccaacgccaaccccaacgcgaacccgaacgccaaccccaacguggaccccaacgccaaccccaacgccaacccgaacgccaaccccaacgcgaaccccaacgccaacccgaacgccaaccccaacgccaaccccaacgccaaccccaacgcgaacccgaacgccaaccccaacgccaaccccaacgccaaccccaacgcgaacccgaacgccaaccccaacgccaaccccaacgccaaccccaacgccaacccgaacgcgaaccccgccgccuacaucaagcccggcagcgccaacaagcccaaggacgagcuggacuacgccaacgacaucgagaagaagaucugcaagauggagaagugcuccgcggccuacgagccgagcgacaagcacaucaaggaguaccucaacaagauccagaacucccuggccgccuacgccaaguucguggcggccuggacccugaaggccgccgcgugaggacuagucccuguucccagagcccacuuuuuuuucuuuuuuugaaauaaaauagccugucuuucagaucucaaaggcucuuuucagagccaccaaaaaaaaaaaaaaaaaaaaaaaaaaaaaaaaaaaaaaaaaaaaaaaaaaaaaaaaaaaaaaaaaaaaaaaaaaaaaaaaaaaaaaaaaaaaaaaaaaaaagaauu

SEQ ID NO: 9597 - RNA, 1403 nt, Artificial Sequence
  mRNA Design a-3 (hSL-A100-N5) comprising derived and/or modified sequence from Pf(3D7)__XP_001351122.1__HsALB_Pf-CSP(19-272)_L(AAY)_Pf-CSP(310-3 27)_L(AAY)_Pf-CSP(346-375)_L(AAY)_PADRE (opt1)
aggagagggcgcuuggcuugcaaggacccugagcugcggcauugaagcacacccaacccaacucgacugaagucagccucacugaaccggaucugagaaucuucucucucugggcuugccagggcucuccgaaccuagcuagcauccucuucaauuccaacuagaaagcuuaccaugaagugggugaccuucaucagccuccuguuccuguucuccagcgccuacucccuguuccaggaguaccagugcuacggcagcuccagcaacacccgcguccucaacgagcugaacuacgacaacgccgggacgaaccuguacaacgagcucgagaugaacuacuacggcaagcaggagaacugguacucccugaagaagaacagccggucccugggggagaacgacgacggcaacaacgaggacaacgagaagcuccgcaagcccaagcacaagaagcugaagcagccggcggacgggaaccccgaccccaacgccaaccccaacguggacccgaacgccaaccccaacguggaccccaacgccaaccccaacgucgacccgaacgccaaccccaacgcgaaccccaacgccaaccccaacgccaacccgaacgccaaccccaacgcgaaccccaacgccaaccccaacgccaacccgaacgccaaccccaacgccaaccccaacgcgaaccccaacgccaacccgaacgccaaccccaacgccaaccccaacgccaaccccaacgcgaacccgaacgccaaccccaacguggaccccaacgccaaccccaacgccaacccgaacgccaaccccaacgcgaaccccaacgccaacccgaacgccaaccccaacgccaaccccaacgccaaccccaacgcgaacccgaacgccaaccccaacgccaaccccaacgccaaccccaacgcgaacccgaacgccaaccccaacgccaaccccaacgccaaccccaacgccaacccgaacgcgaaccccgccgccuacgagcccagcgacaagcacaucaaggaguaccugaacaagauccagaacucccucgccgccuacaucaagcccggcagcgcgaacaagccgaaggacgagcuggacuacgccaacgacaucgagaagaagaucugcaagauggagaagugcuccgccgccuacgccaaguucguggcggccuggacccugaaggccgccgcgugaggacuagucccuguucccagagcccacuuuuuuuucuuuuuuugaaauaaaauagccugucuuucagaucucaaaggcucuuuucagagccaccaaaaaaaaaaaaaaaaaaaaaaaaaaaaaaaaaaaaaaaaaaaaaaaaaaaaaaaaaaaaaaaaaaaaaaaaaaaaaaaaaaaaaaaaaaaaaaaaaaaaagaauu

SEQ ID NO: 9598 - RNA, 1457 nt, Artificial Sequence
  mRNA Design a-3 (hSL-A100-N5) comprising derived and/or modified sequence from Pf(3D7)__XP_001351122.1__HsALB_Pf-CSP(19-272)_L(AAY)_Pf-CSP(310-3 27)_L(AAY)_Pf-CSP(346-375)_L(AAY)_PADRE_L(AAY)_P2 (opt1)
aggagagggcgcuuggcuugcaaggacccugagcugcggcauugaagcacacccaacccaacucgacugaagucagccucacugaaccggaucugagaaucuucucucucugggcuugccagggcucuccgaaccuagcuagcauccucuucaauuccaacuagaaagcuuaccaugaagugggugaccuucaucagccuccuguuccuguucuccagcgccuacucccuguuccaggaguaccagugcuacggcagcuccagcaacacccgcguccucaacgagcugaacuacgacaacgccgggacgaaccuguacaacgagcucgagaugaacuacuacggcaagcaggagaacugguacucccugaagaagaacagccggucccugggggagaacgacgacggcaacaacgaggacaacgagaagcuccgcaagcccaagcacaagaagcugaagcagccggcggacgggaaccccgaccccaacgccaaccccaacguggacccgaacgccaaccccaacguggaccccaacgccaaccccaacgucgacccgaacgccaaccccaacgcgaaccccaacgccaaccccaacgccaacccgaacgccaaccccaacgcgaaccccaacgccaaccccaacgccaacccgaacgccaaccccaacgccaaccccaacgcgaaccccaacgccaacccgaacgccaaccccaacgccaaccccaacgccaaccccaacgcgaacccgaacgccaaccccaacguggaccccaacgccaaccccaacgccaacccgaacgccaaccccaacgcgaaccccaacgccaacccgaacgccaaccccaacgccaaccccaacgccaaccccaacgcgaacccgaacgccaaccccaacgccaaccccaacgccaaccccaacgcgaacccgaacgccaaccccaacgccaaccccaacgccaaccccaacgccaacccgaacgcgaaccccgccgccuacgagcccagcgacaagcacaucaaggaguaccugaacaagauccagaacucccucgccgccuacaucaagcccggcagcgcgaacaagccgaaggacgagcuggacuacgccaacgacaucgagaagaagaucugcaagauggagaagugcuccgccgccuacgccaaguucguggcggccuggacccugaaggccgccgcggccgccuaccaguacaucaaggccaacagcaaguucaucggcaucaccgagcucugaggacuagucccuguucccagagcccacuuuuuuuucuuuuuuugaaauaaaauagccugucuuucagaucucaaaggcucuuuucagagccaccaaaaaaaaaaaaaaaaaaaaaaaaaaaaaaaaaaaaaaaaaaaaaaaaaaaaaaaaaaaaaaaaaaaaaaaaaaaaaaaaaaaaaaaaaaaaaaaaaaaaagaauu

SEQ ID NO: 9599 - RNA, 1421 nt, Artificial Sequence
  mRNA Design a-3 (hSL-A100-N5) comprising derived and/or modified sequence from Pf(3D7)__XP_001351122.1__HsALB_Pf-CSP(19-272)_L(AAY)_Pf-CSP(310-3 27)_Linker (AAY)_Pf-CSP(346-397) (opt1)
aggagagggcgcuuggcuugcaaggacccugagcugcggcauugaagcacacccaacccaacucgacugaagucagccucacugaaccggaucugagaaucuucucucucugggcuugccagggcucuccgaaccuagcuagcauccucuucaauuccaacuagaaagcuuaccaugaagugggugaccuucaucagccuccuguuccuguucuccagcgccuacucccuguuccaggaguaccagugcuacggcagcuccagcaacacccgcguccucaacgagcugaacuacgacaacgccgggacgaaccuguacaacgagcucgagaugaacuacuacggcaagcaggagaacugguacucccugaagaagaacagccggucccugggggagaacgacgacggcaacaacgaggacaacgagaagcuccgcaagcccaagcacaagaagcugaagcagccggcggacgggaaccccgaccccaacgccaaccccaacguggacccgaacgccaaccccaacguggaccccaacgccaaccccaacgucgacccgaacgccaaccccaacgcgaaccccaacgccaaccccaacgccaacccgaacgccaaccccaacgcgaaccccaacgccaaccccaacgccaacccgaacgccaaccccaacgccaaccccaacgcgaaccccaacgccaacccgaacgccaaccccaacgccaaccccaacgccaaccccaacgcgaacccgaacgccaaccccaacguggaccccaacgccaaccccaacgccaacccgaacgccaaccccaacgcgaaccccaacgccaacccgaacgccaaccccaacgccaaccccaacgccaaccccaacgcgaacccgaacgccaaccccaacgccaaccccaacgccaaccccaacgcgaacccgaacgccaaccccaacgccaaccccaacgccaaccccaacgccaacccgaacgcgaaccccgccgccuacgagcccagcgacaagcacaucaaggaguaccugaacaagauccagaacucccucgccgccuacaucaagcccggcagcgcgaacaagccgaaggacgagcuggacuacgccaacgacaucgagaagaagaucugcaagauggagaagugcuccagcguguucaacgucgugaacuccagcaucggccugaucauggugcucuccuuccuguuccugaacugaggacuagucccuguucccagagcccacuuuuuuuucuuuuuuugaaauaaaauagccugucuuucagaucucaaaggcucuuuucagagccaccaaaaaaaaaaaaaaaaaaaaaaaaaaaaaaaaaaaaaaaaaaaaaaaaaaaaaaaaaaaaaaaaaaaaaaaaaaaaaaaaaaaaaaaaaaaaaaaaaaaaagaauu

SEQ ID NO: 9600 - RNA, 2021 nt, Artificial Sequence
  mRNA Design a-3 (hSL-A100-N5) comprising derived and/or modified sequence from Pf(3D7)__XP_001351122.1__LumSynt_L(GGS4-GGG)_Pf-CSP(19-397) (opt2)
aggagagggcgcuuggcuugcaaggacccugagcugcggcauugaagcacacccaacccaacucgacugaagucagccucacugaaccggaucugagaaucuucucucucugggcuugccagggcucuccgaaccuagcuagcauccucuucaauuccaacuagaaagcuuaccaugcagaucuacgagggcaagcucaccgccgagggccuccgcuucggcaucgucgccucccgcuucaaccacgcccucgucgaccgccucgucgagggcgccaucgacgccaucguccgccacggcggccgcgaggaggacaucacccucguccgcguccccggcuccugggagauccccgucgccgccggcgagcucgcccgcaaggaggacaucgacgccgucaucgccaucggcguccucauccgcggcgccaccccccacuucgacuacaucgccuccgaggucuccaagggccucgccgaccucucccucgagcuccgcaagcccaucaccuucggcgucaucaccgccgacacccucgagcaggccaucgagcgcgccggcaccaagcacggcaacaagggcugggaggccgcccucuccgccaucgagauggccaaccucuucaagucccuccgcggcggcuccggcggcuccggcggcuccggcggcuccggcggcggccucuuccaggaguaccagugcuacggcuccuccuccaacacccgcguccucaacgagcucaacuacgacaacgccggcaccaaccucuacaacgagcucgagaugaacuacuacggcaagcaggagaacugguacucccucaagaagaacucccgcucccucggcgagaacgacgacggcaacaacgaggacaacgagaagcuccgcaagcccaagcacaagaagcucaagcagcccgccgacggcaaccccgaccccaacgccaaccccaacgucgaccccaacgccaaccccaacgucgaccccaacgccaaccccaacgucgaccccaacgccaaccccaacgccaaccccaacgccaaccccaacgccaaccccaacgccaaccccaacgccaaccccaacgccaaccccaacgccaaccccaacgccaaccccaacgccaaccccaacgccaaccccaacgccaaccccaacgccaaccccaacgccaaccccaacgccaaccccaacgccaaccccaacgccaaccccaacgucgaccccaacgccaaccccaacgccaaccccaacgccaaccccaacgccaaccccaacgccaaccccaacgccaaccccaacgccaaccccaacgccaaccccaacgccaaccccaacgccaaccccaacgccaaccccaacgccaaccccaacgccaaccccaacgccaaccccaacgccaaccccaacgccaaccccaacgccaaccccaacgccaaccccaacaagaacaaccagggcaacggccagggccacaacaugcccaacgaccccaaccgcaacgucgacgagaacgccaacgccaacuccgccgucaagaacaacaacaacgaggagcccuccgacaagcacaucaaggaguaccucaacaagauccagaacucccucuccaccgaguggucccccugcuccgucaccugcggcaacggcauccagguccgcaucaagcccggcuccgccaacaagcccaaggacgagcucgacuacgccaacgacaucgagaagaagaucugcaagauggagaagugcuccuccgucuucaacgucgucaacuccuccaucggccucaucaugguccucuccuuccucuuccucaacugaggacuagucccuguucccagagcccacuuuuuuuucuuuuuuugaaauaaaauagccugucuuucagaucucaaaggcucuuuucagagccaccaaaaaaaaaaaaaaaaaaaaaaaaaaaaaaaaaaaaaaaaaaaaaaaaaaaaaaaaaaaaaaaaaaaaaaaaaaaaaaaaaaaaaaaaaaaaaaaaaaaaagaauu

SEQ ID NO: 9601 - RNA, 1883 nt, Artificial Sequence
  mRNA Design a-3 (hSL-A100-N5) comprising derived and/or modified sequence from Pf(3D7)__XP_001351122.1__HsALB_Pf-CSP(19-272)_L(PVTN)_HBsAg (opt2)
aggagagggcgcuuggcuugcaaggacccugagcugcggcauugaagcacacccaacccaacucgacugaagucagccucacugaaccggaucugagaaucuucucucucugggcuugccagggcucuccgaaccuagcuagcauccucuucaauuccaacuagaaagcuuaccaugaagugggucaccuucaucucccuccucuuccucuucuccuccgccuacucccucuuccaggaguaccagugcuacggcuccuccuccaacacccgcguccucaacgagcucaacuacgacaacgccggcaccaaccucuacaacgagcucgagaugaacuacuacggcaagcaggagaacugguacucccucaagaagaacucccgcucccucggcgagaacgacgacggcaacaacgaggacaacgagaagcuccgcaagcccaagcacaagaagcucaagcagcccgccgacggcaaccccgaccccaacgccaaccccaacgucgaccccaacgccaaccccaacgucgaccccaacgccaaccccaacgucgaccccaacgccaaccccaacgccaaccccaacgccaaccccaacgccaaccccaacgccaaccccaacgccaaccccaacgccaaccccaacgccaaccccaacgccaaccccaacgccaaccccaacgccaaccccaacgccaaccccaacgccaaccccaacgccaaccccaacgccaaccccaacgccaaccccaacgccaaccccaacgucgaccccaacgccaaccccaacgccaaccccaacgccaaccccaacgccaaccccaacgccaaccccaacgccaaccccaacgccaaccccaacgccaaccccaacgccaaccccaacgccaaccccaacgccaaccccaacgccaaccccaacgccaaccccaacgccaaccccaacgccaaccccaacgccaaccccaacgccaaccccaacgccaacccccccgucaccaacauggagaacaucaccuccggcuuccucggcccccuccucguccuccaggccggcuucuuccuccucacccgcauccucaccaucccccagucccucgacuccugguggaccucccucaacuuccucggcggcucccccgucugccucggccagaacucccagucccccaccuccaaccacucccccaccuccugcccccccaucugccccggcuaccgcuggaugugccuccgccgcuucaucaucuuccucuucauccuccuccucugccucaucuuccuccucguccuccucgacuaccagggcaugcuccccgucugcccccucauccccggcuccaccaccaccaacaccggccccugcaagaccugcaccacccccgcccagggcaacuccauguuccccuccugcugcugcaccaagcccaccgacggcaacugcaccugcauccccauccccuccuccugggccuucgccaaguaccucugggagugggccuccguccgcuucuccuggcucucccuccucguccccuucguccagugguucgucggccucucccccaccgucuggcucuccgccaucuggaugaugugguacuggggccccucccucuacuccaucgucucccccuucaucccccuccuccccaucuucuucugccucugggucuacaucugaggacuagucccuguucccagagcccacuuuuuuuucuuuuuuugaaauaaaauagccugucuuucagaucucaaaggcucuuuucagagccaccaaaaaaaaaaaaaaaaaaaaaaaaaaaaaaaaaaaaaaaaaaaaaaaaaaaaaaaaaaaaaaaaaaaaaaaaaaaaaaaaaaaaaaaaaaaaaaaaaaaaagaauu

SEQ ID NO: 9602 - RNA, 2000 nt, Artificial Sequence
  mRNA Design a-3 (hSL-A100-N5) comprising derived and/or modified sequence from Pf(3D7)__XP_001351122.1__HsALB_Pf-CSP(19-272)_L(AAY)_Pf-CSP(346-3 65)_L(AAY)_PADRE_L(PVTN)_HBsAg (opt2)
aggagagggcgcuuggcuugcaaggacccugagcugcggcauugaagcacacccaacccaacucgacugaagucagccucacugaaccggaucugagaaucuucucucucugggcuugccagggcucuccgaaccuagcuagcauccucuucaauuccaacuagaaagcuuaccaugaagugggucaccuucaucucccuccucuuccucuucuccuccgccuacucccucuuccaggaguaccagugcuacggcuccuccuccaacacccgcguccucaacgagcucaacuacgacaacgccggcaccaaccucuacaacgagcucgagaugaacuacuacggcaagcaggagaacugguacucccucaagaagaacucccgcucccucggcgagaacgacgacggcaacaacgaggacaacgagaagcuccgcaagcccaagcacaagaagcucaagcagcccgccgacggcaaccccgaccccaacgccaaccccaacgucgaccccaacgccaaccccaacgucgaccccaacgccaaccccaacgucgaccccaacgccaaccccaacgccaaccccaacgccaaccccaacgccaaccccaacgccaaccccaacgccaaccccaacgccaaccccaacgccaaccccaacgccaaccccaacgccaaccccaacgccaaccccaacgccaaccccaacgccaaccccaacgccaaccccaacgccaaccccaacgccaaccccaacgccaaccccaacgucgaccccaacgccaaccccaacgccaaccccaacgccaaccccaacgccaaccccaacgccaaccccaacgccaaccccaacgccaaccccaacgccaaccccaacgccaaccccaacgccaaccccaacgccaaccccaacgccaaccccaacgccaaccccaacgccaaccccaacgccaaccccaacgccaaccccaacgccaaccccaacgccaaccccgccgccuacaucaagcccggcuccgccaacaagcccaaggacgagcucgacuacgccaacgacaucgaggccgccuacgccaaguucgucgccgccuggacccucaaggccgccgcccccgucaccaacauggagaacaucaccuccggcuuccucggcccccuccucguccuccaggccggcuucuuccuccucacccgcauccucaccaucccccagucccucgacuccugguggaccucccucaacuuccucggcggcucccccgucugccucggccagaacucccagucccccaccuccaaccacucccccaccuccugcccccccaucugccccggcuaccgcuggaugugccuccgccgcuucaucaucuuccucuucauccuccuccucugccucaucuuccuccucguccuccucgacuaccagggcaugcuccccgucugcccccucauccccggcuccaccaccaccaacaccggccccugcaagaccugcaccacccccgcccagggcaacuccauguuccccuccugcugcugcaccaagcccaccgacggcaacugcaccugcauccccauccccuccuccugggccuucgccaaguaccucugggagugggccuccguccgcuucuccuggcucucccuccucguccccuucguccagugguucgucggccucucccccaccgucuggcucuccgccaucuggaugaugugguacuggggccccucccucuacuccaucgucucccccuucaucccccuccuccccaucuucuucugccucugggucuacaucugaggacuagucccuguucccagagcccacuuuuuuuucuuuuuuugaaauaaaauagccugucuuucagaucucaaaggcucuuuucagagccaccaaaaaaaaaaaaaaaaaaaaaaaaaaaaaaaaaaaaaaaaaaaaaaaaaaaaaaaaaaaaaaaaaaaaaaaaaaaaaaaaaaaaaaaaaaaaaaaaaaaaagaauu

SEQ ID NO: 9603 - RNA, 2219 nt, Artificial Sequence
  mRNA Design a-3 (hSL-A100-N5) comprising derived and/or modified sequence from Pf(3D7)__XP_001351122.1__HsALB_Pf-CSP(19-384)_L(PVTN)_HBsAg (opt2)
aggagagggcgcuuggcuugcaaggacccugagcugcggcauugaagcacacccaacccaacucgacugaagucagccucacugaaccggaucugagaaucuucucucucugggcuugccagggcucuccgaaccuagcuagcauccucuucaauuccaacuagaaagcuuaccaugaagugggucaccuucaucucccuccucuuccucuucuccuccgccuacucccucuuccaggaguaccagugcuacggcuccuccuccaacacccgcguccucaacgagcucaacuacgacaacgccggcaccaaccucuacaacgagcucgagaugaacuacuacggcaagcaggagaacugguacucccucaagaagaacucccgcucccucggcgagaacgacgacggcaacaacgaggacaacgagaagcuccgcaagcccaagcacaagaagcucaagcagcccgccgacggcaaccccgaccccaacgccaaccccaacgucgaccccaacgccaaccccaacgucgaccccaacgccaaccccaacgucgaccccaacgccaaccccaacgccaaccccaacgccaaccccaacgccaaccccaacgccaaccccaacgccaaccccaacgccaaccccaacgccaaccccaacgccaaccccaacgccaaccccaacgccaaccccaacgccaaccccaacgccaaccccaacgccaaccccaacgccaaccccaacgccaaccccaacgccaaccccaacgucgaccccaacgccaaccccaacgccaaccccaacgccaaccccaacgccaaccccaacgccaaccccaacgccaaccccaacgccaaccccaacgccaaccccaacgccaaccccaacgccaaccccaacgccaaccccaacgccaaccccaacgccaaccccaacgccaaccccaacgccaaccccaacgccaaccccaacgccaaccccaacgccaaccccaacaagaacaaccagggcaacggccagggccacaacaugcccaacgaccccaaccgcaacgucgacgagaacgccaacgccaacuccgccgucaagaacaacaacaacgaggagcccuccgacaagcacaucaaggaguaccucaacaagauccagaacucccucuccaccgaguggucccccugcuccgucaccugcggcaacggcauccagguccgcaucaagcccggcuccgccaacaagcccaaggacgagcucgacuacgccaacgacaucgagaagaagaucugcaagauggagaagugcuccuccgucuucaacgucgucaacuccucccccgucaccaacauggagaacaucaccuccggcuuccucggcccccuccucguccuccaggccggcuucuuccuccucacccgcauccucaccaucccccagucccucgacuccugguggaccucccucaacuuccucggcggcucccccgucugccucggccagaacucccagucccccaccuccaaccacucccccaccuccugcccccccaucugccccggcuaccgcuggaugugccuccgccgcuucaucaucuuccucuucauccuccuccucugccucaucuuccuccucguccuccucgacuaccagggcaugcuccccgucugcccccucauccccggcuccaccaccaccaacaccggccccugcaagaccugcaccacccccgcccagggcaacuccauguuccccuccugcugcugcaccaagcccaccgacggcaacugcaccugcauccccauccccuccuccugggccuucgccaaguaccucugggagugggccuccguccgcuucuccuggcucucccuccucguccccuucguccagugguucgucggccucucccccaccgucuggcucuccgccaucuggaugaugugguacuggggccccucccucuacuccaucgucucccccuucaucccccuccuccccaucuucuucugccucugggucuacaucugaggacuagucccuguucccagagcccacuuuuuuuucuuuuuuugaaauaaaauagccugucuuucagaucucaaaggcucuuuucagagccaccaaaaaaaaaaaaaaaaaaaaaaaaaaaaaaaaaaaaaaaaaaaaaaaaaaaaaaaaaaaaaaaaaaaaaaaaaaaaaaaaaaaaaaaaaaaaaaaaaaaaagaauu

SEQ ID NO: 9604 - RNA, 2036 nt, Artificial Sequence
  mRNA Design a-3 (hSL-A100-N5) comprising derived and/or modified sequence from Pf(3D7)__XP_001351122.1__HsALB_Pf-CSP(19-384)_L(SGG)_Ferritin (opt2)
aggagagggcgcuuggcuugcaaggacccugagcugcggcauugaagcacacccaacccaacucgacugaagucagccucacugaaccggaucugagaaucuucucucucugggcuugccagggcucuccgaaccuagcuagcauccucuucaauuccaacuagaaagcuuaccaugaagugggucaccuucaucucccuccucuuccucuucuccuccgccuacucccucuuccaggaguaccagugcuacggcuccuccuccaacacccgcguccucaacgagcucaacuacgacaacgccggcaccaaccucuacaacgagcucgagaugaacuacuacggcaagcaggagaacugguacucccucaagaagaacucccgcucccucggcgagaacgacgacggcaacaacgaggacaacgagaagcuccgcaagcccaagcacaagaagcucaagcagcccgccgacggcaaccccgaccccaacgccaaccccaacgucgaccccaacgccaaccccaacgucgaccccaacgccaaccccaacgucgaccccaacgccaaccccaacgccaaccccaacgccaaccccaacgccaaccccaacgccaaccccaacgccaaccccaacgccaaccccaacgccaaccccaacgccaaccccaacgccaaccccaacgccaaccccaacgccaaccccaacgccaaccccaacgccaaccccaacgccaaccccaacgccaaccccaacgccaaccccaacgucgaccccaacgccaaccccaacgccaaccccaacgccaaccccaacgccaaccccaacgccaaccccaacgccaaccccaacgccaaccccaacgccaaccccaacgccaaccccaacgccaaccccaacgccaaccccaacgccaaccccaacgccaaccccaacgccaaccccaacgccaaccccaacgccaaccccaacgccaaccccaacgccaaccccaacaagaacaaccagggcaacggccagggccacaacaugcccaacgaccccaaccgcaacgucgacgagaacgccaacgccaacuccgccgucaagaacaacaacaacgaggagcccuccgacaagcacaucaaggaguaccucaacaagauccagaacucccucuccaccgaguggucccccugcuccgucaccugcggcaacggcauccagguccgcaucaagcccggcuccgccaacaagcccaaggacgagcucgacuacgccaacgacaucgagaagaagaucugcaagauggagaagugcuccuccgucuucaacgucgucaacuccuccuccggcggccucuccaaggacaucaucaagcuccucaacgagcaggucaacaaggagaugaacuccuccaaccucuacauguccauguccuccuggugcuacacccacucccucgacggcgccggccucuuccucuucgaccacgccgccgaggaguacgagcacgccaagaagcucaucaucuuccucaacgagaacaacguccccguccagcucaccuccaucuccgcccccgagcacaaguucgagggccucacccagaucuuccagaaggccuacgagcacgagcagcacaucuccgaguccaucaacaacaucgucgaccacgccaucaaguccaaggaccacgccaccuucaacuuccuccagugguacgucgccgagcagcacgaggaggagguccucuucaaggacauccucgacaagaucgagcucaucggcaacgagaaccacggccucuaccucgccgaccaguacgucaagggcaucgccaagucccgcaaguccugaggacuagucccuguucccagagcccacuuuuuuuucuuuuuuugaaauaaaauagccugucuuucagaucucaaaggcucuuuucagagccaccaaaaaaaaaaaaaaaaaaaaaaaaaaaaaaaaaaaaaaaaaaaaaaaaaaaaaaaaaaaaaaaaaaaaaaaaaaaaaaaaaaaaaaaaaaaaaaaaaaaaagaauu

SEQ ID NO: 9605 - RNA, 1997 nt, Artificial Sequence
  mRNA Design a-3 (hSL-A100-N5) comprising derived and/or modified sequence from Pf(3D7)__XP_001351122.1__HsALB_Pf-CSP(93-384)_L(PVTN)_HBsAg (opt2)
aggagagggcgcuuggcuugcaaggacccugagcugcggcauugaagcacacccaacccaacucgacugaagucagccucacugaaccggaucugagaaucuucucucucugggcuugccagggcucuccgaaccuagcuagcauccucuucaauuccaacuagaaagcuuaccaugaagugggucaccuucaucucccuccucuuccucuucuccuccgccuacuccaagcucaagcagcccgccgacggcaaccccgaccccaacgccaaccccaacgucgaccccaacgccaaccccaacgucgaccccaacgccaaccccaacgucgaccccaacgccaaccccaacgccaaccccaacgccaaccccaacgccaaccccaacgccaaccccaacgccaaccccaacgccaaccccaacgccaaccccaacgccaaccccaacgccaaccccaacgccaaccccaacgccaaccccaacgccaaccccaacgccaaccccaacgccaaccccaacgccaaccccaacgccaaccccaacgucgaccccaacgccaaccccaacgccaaccccaacgccaaccccaacgccaaccccaacgccaaccccaacgccaaccccaacgccaaccccaacgccaaccccaacgccaaccccaacgccaaccccaacgccaaccccaacgccaaccccaacgccaaccccaacgccaaccccaacgccaaccccaacgccaaccccaacgccaaccccaacgccaaccccaacaagaacaaccagggcaacggccagggccacaacaugcccaacgaccccaaccgcaacgucgacgagaacgccaacgccaacuccgccgucaagaacaacaacaacgaggagcccuccgacaagcacaucaaggaguaccucaacaagauccagaacucccucuccaccgaguggucccccugcuccgucaccugcggcaacggcauccagguccgcaucaagcccggcuccgccaacaagcccaaggacgagcucgacuacgccaacgacaucgagaagaagaucugcaagauggagaagugcuccuccgucuucaacgucgucaacuccucccccgucaccaacauggagaacaucaccuccggcuuccucggcccccuccucguccuccaggccggcuucuuccuccucacccgcauccucaccaucccccagucccucgacuccugguggaccucccucaacuuccucggcggcucccccgucugccucggccagaacucccagucccccaccuccaaccacucccccaccuccugcccccccaucugccccggcuaccgcuggaugugccuccgccgcuucaucaucuuccucuucauccuccuccucugccucaucuuccuccucguccuccucgacuaccagggcaugcuccccgucugcccccucauccccggcuccaccaccaccaacaccggccccugcaagaccugcaccacccccgcccagggcaacuccauguuccccuccugcugcugcaccaagcccaccgacggcaacugcaccugcauccccauccccuccuccugggccuucgccaaguaccucugggagugggccuccguccgcuucuccuggcucucccuccucguccccuucguccagugguucgucggccucucccccaccgucuggcucuccgccaucuggaugaugugguacuggggccccucccucuacuccaucgucucccccuucaucccccuccuccccaucuucuucugccucugggucuacaucugaggacuagucccuguucccagagcccacuuuuuuuucuuuuuuugaaauaaaauagccugucuuucagaucucaaaggcucuuuucagagccaccaaaaaaaaaaaaaaaaaaaaaaaaaaaaaaaaaaaaaaaaaaaaaaaaaaaaaaaaaaaaaaaaaaaaaaaaaaaaaaaaaaaaaaaaaaaaaaaaaaaaagaauu

SEQ ID NO: 9606 - RNA, 1658 nt, Artificial Sequence; identical to SEQ ID NO: 7619
  mRNA Design a-3 (hSL-A100-N5) comprising derived and/or modified sequence from Pf(3D7)__XP_001351122.1__HsALB_Pf-CSP(199-377)_L(PVTN)_HBsAg (opt2)

SEQ ID NO: 9607 - RNA, 1355 nt, Artificial Sequence
  mRNA Design a-3 (hSL-A100-N5) comprising derived and/or modified sequence from Pf(3D7)__XP_001351122.1__HsALB_Pf-CSP(19-272)_L(AAY)_Pf-CSP(346-3 75)_L(AAY)_Pf-CSP(310-327) (opt2)
aggagagggcgcuuggcuugcaaggacccugagcugcggcauugaagcacacccaacccaacucgacugaagucagccucacugaaccggaucugagaaucuucucucucugggcuugccagggcucuccgaaccuagcuagcauccucuucaauuccaacuagaaagcuuaccaugaagugggucaccuucaucucccuccucuuccucuucuccuccgccuacucccucuuccaggaguaccagugcuacggcuccuccuccaacacccgcguccucaacgagcucaacuacgacaacgccggcaccaaccucuacaacgagcucgagaugaacuacuacggcaagcaggagaacugguacucccucaagaagaacucccgcucccucggcgagaacgacgacggcaacaacgaggacaacgagaagcuccgcaagcccaagcacaagaagcucaagcagcccgccgacggcaaccccgaccccaacgccaaccccaacgucgaccccaacgccaaccccaacgucgaccccaacgccaaccccaacgucgaccccaacgccaaccccaacgccaaccccaacgccaaccccaacgccaaccccaacgccaaccccaacgccaaccccaacgccaaccccaacgccaaccccaacgccaaccccaacgccaaccccaacgccaaccccaacgccaaccccaacgccaaccccaacgccaaccccaacgccaaccccaacgccaaccccaacgccaaccccaacgucgaccccaacgccaaccccaacgccaaccccaacgccaaccccaacgccaaccccaacgccaaccccaacgccaaccccaacgccaaccccaacgccaaccccaacgccaaccccaacgccaaccccaacgccaaccccaacgccaaccccaacgccaaccccaacgccaaccccaacgccaaccccaacgccaaccccaacgccaaccccaacgccaaccccgccgccuacaucaagcccggcuccgccaacaagcccaaggacgagcucgacuacgccaacgacaucgagaagaagaucugcaagauggagaagugcuccgccgccuacgagcccuccgacaagcacaucaaggaguaccucaacaagauccagaacucccucugaggacuagucccuguucccagagcccacuuuuuuuucuuuuuuugaaauaaaauagccugucuuucagaucucaaaggcucuuuucagagccaccaaaaaaaaaaaaaaaaaaaaaaaaaaaaaaaaaaaaaaaaaaaaaaaaaaaaaaaaaaaaaaaaaaaaaaaaaaaaaaaaaaaaaaaaaaaaaaaaaaaaagaauu

SEQ ID NO: 9608 - RNA, 1403 nt, Artificial Sequence
  mRNA Design a-3 (hSL-A100-N5) comprising derived and/or modified sequence from Pf(3D7)__XP_001351122.1__HsALB_Pf-CSP(19-272)_L(AAY)_Pf-CSP(346-3 75)_L(AAY)_Pf-CSP(310-327)_L(AAY)_PADRE (opt2)
aggagagggcgcuuggcuugcaaggacccugagcugcggcauugaagcacacccaacccaacucgacugaagucagccucacugaaccggaucugagaaucuucucucucugggcuugccagggcucuccgaaccuagcuagcauccucuucaauuccaacuagaaagcuuaccaugaagugggucaccuucaucucccuccucuuccucuucuccuccgccuacucccucuuccaggaguaccagugcuacggcuccuccuccaacacccgcguccucaacgagcucaacuacgacaacgccggcaccaaccucuacaacgagcucgagaugaacuacuacggcaagcaggagaacugguacucccucaagaagaacucccgcucccucggcgagaacgacgacggcaacaacgaggacaacgagaagcuccgcaagcccaagcacaagaagcucaagcagcccgccgacggcaaccccgaccccaacgccaaccccaacgucgaccccaacgccaaccccaacgucgaccccaacgccaaccccaacgucgaccccaacgccaaccccaacgccaaccccaacgccaaccccaacgccaaccccaacgccaaccccaacgccaaccccaacgccaaccccaacgccaaccccaacgccaaccccaacgccaaccccaacgccaaccccaacgccaaccccaacgccaaccccaacgccaaccccaacgccaaccccaacgccaaccccaacgccaaccccaacgucgaccccaacgccaaccccaacgccaaccccaacgccaaccccaacgccaaccccaacgccaaccccaacgccaaccccaacgccaaccccaacgccaaccccaacgccaaccccaacgccaaccccaacgccaaccccaacgccaaccccaacgccaaccccaacgccaaccccaacgccaaccccaacgccaaccccaacgccaaccccaacgccaaccccgccgccuacaucaagcccggcuccgccaacaagcccaaggacgagcucgacuacgccaacgacaucgagaagaagaucugcaagauggagaagugcuccgccgccuacgagcccuccgacaagcacaucaaggaguaccucaacaagauccagaacucccucgccgccuacgccaaguucgucgccgccuggacccucaaggccgccgccugaggacuagucccuguucccagagcccacuuuuuuuucuuuuuuugaaauaaaauagccugucuuucagaucucaaaggcucuuuucagagccaccaaaaaaaaaaaaaaaaaaaaaaaaaaaaaaaaaaaaaaaaaaaaaaaaaaaaaaaaaaaaaaaaaaaaaaaaaaaaaaaaaaaaaaaaaaaaaaaaaaaaagaauu

SEQ ID NO: 9609 - RNA, 1403 nt, Artificial Sequence
  mRNA Design a-3 (hSL-A100-N5) comprising derived and/or modified sequence from Pf(3D7)__XP_001351122.1__HsALB_Pf-CSP(19-272)_L(AAY)_Pf-CSP(310-3 27)_L(AAY)_Pf-CSP(346-375)_L(AAY)_PADRE (opt2)
aggagagggcgcuuggcuugcaaggacccugagcugcggcauugaagcacacccaacccaacucgacugaagucagccucacugaaccggaucugagaaucuucucucucugggcuugccagggcucuccgaaccuagcuagcauccucuucaauuccaacuagaaagcuuaccaugaagugggucaccuucaucucccuccucuuccucuucuccuccgccuacucccucuuccaggaguaccagugcuacggcuccuccuccaacacccgcguccucaacgagcucaacuacgacaacgccggcaccaaccucuacaacgagcucgagaugaacuacuacggcaagcaggagaacugguacucccucaagaagaacucccgcucccucggcgagaacgacgacggcaacaacgaggacaacgagaagcuccgcaagcccaagcacaagaagcucaagcagcccgccgacggcaaccccgaccccaacgccaaccccaacgucgaccccaacgccaaccccaacgucgaccccaacgccaaccccaacgucgaccccaacgccaaccccaacgccaaccccaacgccaaccccaacgccaaccccaacgccaaccccaacgccaaccccaacgccaaccccaacgccaaccccaacgccaaccccaacgccaaccccaacgccaaccccaacgccaaccccaacgccaaccccaacgccaaccccaacgccaaccccaacgccaaccccaacgccaaccccaacgucgaccccaacgccaaccccaacgccaaccccaacgccaaccccaacgccaaccccaacgccaaccccaacgccaaccccaacgccaaccccaacgccaaccccaacgccaaccccaacgccaaccccaacgccaaccccaacgccaaccccaacgccaaccccaacgccaaccccaacgccaaccccaacgccaaccccaacgccaaccccaacgccaaccccgccgccuacgagcccuccgacaagcacaucaaggaguaccucaacaagauccagaacucccucgccgccuacaucaagcccggcuccgccaacaagcccaaggacgagcucgacuacgccaacgacaucgagaagaagaucugcaagauggagaagugcuccgccgccuacgccaaguucgucgccgccuggacccucaaggccgccgccugaggacuagucccuguucccagagcccacuuuuuuuucuuuuuuugaaauaaaauagccugucuuucagaucucaaaggcucuuuucagagccaccaaaaaaaaaaaaaaaaaaaaaaaaaaaaaaaaaaaaaaaaaaaaaaaaaaaaaaaaaaaaaaaaaaaaaaaaaaaaaaaaaaaaaaaaaaaaaaaaaaaaagaauu

SEQ ID NO: 9610 - RNA, 1457 nt, Artificial Sequence
  mRNA Design a-3 (hSL-A100-N5) comprising derived and/or modified sequence from Pf(3D7)__XP_001351122.1__HsALB_Pf-CSP(19-272)_L(AAY)_Pf-CSP(310-3 27)_L(AAY)_Pf-CSP(346-375)_L(AAY)_PADRE_L(AAY)_P2 (opt2)
aggagagggcgcuuggcuugcaaggacccugagcugcggcauugaagcacacccaacccaacucgacugaagucagccucacugaaccggaucugagaaucuucucucucugggcuugccagggcucuccgaaccuagcuagcauccucuucaauuccaacuagaaagcuuaccaugaagugggucaccuucaucucccuccucuuccucuucuccuccgccuacucccucuuccaggaguaccagugcuacggcuccuccuccaacacccgcguccucaacgagcucaacuacgacaacgccggcaccaaccucuacaacgagcucgagaugaacuacuacggcaagcaggagaacugguacucccucaagaagaacucccgcucccucggcgagaacgacgacggcaacaacgaggacaacgagaagcuccgcaagcccaagcacaagaagcucaagcagcccgccgacggcaaccccgaccccaacgccaaccccaacgucgaccccaacgccaaccccaacgucgaccccaacgccaaccccaacgucgaccccaacgccaaccccaacgccaaccccaacgccaaccccaacgccaaccccaacgccaaccccaacgccaaccccaacgccaaccccaacgccaaccccaacgccaaccccaacgccaaccccaacgccaaccccaacgccaaccccaacgccaaccccaacgccaaccccaacgccaaccccaacgccaaccccaacgccaaccccaacgucgaccccaacgccaaccccaacgccaaccccaacgccaaccccaacgccaaccccaacgccaaccccaacgccaaccccaacgccaaccccaacgccaaccccaacgccaaccccaacgccaaccccaacgccaaccccaacgccaaccccaacgccaaccccaacgccaaccccaacgccaaccccaacgccaaccccaacgccaaccccaacgccaaccccgccgccuacgagcccuccgacaagcacaucaaggaguaccucaacaagauccagaacucccucgccgccuacaucaagcccggcuccgccaacaagcccaaggacgagcucgacuacgccaacgacaucgagaagaagaucugcaagauggagaagugcuccgccgccuacgccaaguucgucgccgccuggacccucaaggccgccgccgccgccuaccaguacaucaaggccaacuccaaguucaucggcaucaccgagcucugaggacuagucccuguucccagagcccacuuuuuuuucuuuuuuugaaauaaaauagccugucuuucagaucucaaaggcucuuuucagagccaccaaaaaaaaaaaaaaaaaaaaaaaaaaaaaaaaaaaaaaaaaaaaaaaaaaaaaaaaaaaaaaaaaaaaaaaaaaaaaaaaaaaaaaaaaaaaaaaaaaaaagaauu

SEQ ID NO: 9611 - RNA, 1421 nt, Artificial Sequence
  mRNA Design a-3 (hSL-A100-N5) comprising derived and/or modified sequence from Pf(3D7)__XP_001351122.1__HsALB_Pf-CSP(19-272)_L(AAY)_Pf-CSP(310-3 27)_Linker (AAY)_Pf-CSP(346-397) (opt2)
aggagagggcgcuuggcuugcaaggacccugagcugcggcauugaagcacacccaacccaacucgacugaagucagccucacugaaccggaucugagaaucuucucucucugggcuugccagggcucuccgaaccuagcuagcauccucuucaauuccaacuagaaagcuuaccaugaagugggucaccuucaucucccuccucuuccucuucuccuccgccuacucccucuuccaggaguaccagugcuacggcuccuccuccaacacccgcguccucaacgagcucaacuacgacaacgccggcaccaaccucuacaacgagcucgagaugaacuacuacggcaagcaggagaacugguacucccucaagaagaacucccgcucccucggcgagaacgacgacggcaacaacgaggacaacgagaagcuccgcaagcccaagcacaagaagcucaagcagcccgccgacggcaaccccgaccccaacgccaaccccaacgucgaccccaacgccaaccccaacgucgaccccaacgccaaccccaacgucgaccccaacgccaaccccaacgccaaccccaacgccaaccccaacgccaaccccaacgccaaccccaacgccaaccccaacgccaaccccaacgccaaccccaacgccaaccccaacgccaaccccaacgccaaccccaacgccaaccccaacgccaaccccaacgccaaccccaacgccaaccccaacgccaaccccaacgccaaccccaacgucgaccccaacgccaaccccaacgccaaccccaacgccaaccccaacgccaaccccaacgccaaccccaacgccaaccccaacgccaaccccaacgccaaccccaacgccaaccccaacgccaaccccaacgccaaccccaacgccaaccccaacgccaaccccaacgccaaccccaacgccaaccccaacgccaaccccaacgccaaccccaacgccaaccccgccgccuacgagcccuccgacaagcacaucaaggaguaccucaacaagauccagaacucccucgccgccuacaucaagcccggcuccgccaacaagcccaaggacgagcucgacuacgccaacgacaucgagaagaagaucugcaagauggagaagugcuccuccgucuucaacgucgucaacuccuccaucggccucaucaugguccucuccuuccucuuccucaacugaggacuagucccuguucccagagcccacuuuuuuuucuuuuuuugaaauaaaauagccugucuuucagaucucaaaggcucuuuucagagccaccaaaaaaaaaaaaaaaaaaaaaaaaaaaaaaaaaaaaaaaaaaaaaaaaaaaaaaaaaaaaaaaaaaaaaaaaaaaaaaaaaaaaaaaaaaaaaaaaaaaaagaauu

SEQ ID NO: 9612 - RNA, 2021 nt, Artificial Sequence
  mRNA Design a-3 (hSL-A100-N5) comprising derived and/or modified sequence from Pf(3D7)__XP_001351122.1__LumSynt_L(GGS4-GGG)_Pf-CSP(19-397) (opt3)
aggagagggcgcuuggcuugcaaggacccugagcugcggcauugaagcacacccaacccaacucgacugaagucagccucacugaaccggaucugagaaucuucucucucugggcuugccagggcucuccgaaccuagcuagcauccucuucaauuccaacuagaaagcuuaccaugcagaucuacgagggcaagcugaccgccgaagggcucagauucggaauuguggcuagcagguuuaaccacgcacuugucgaccggcugguugagggugccauagaugcgaucgugcgccauggcgggcgagaagaggacauuacauugguacgugugcccggauccugggaaaucccugucgcugccggcgaguuagcaagaaaagaggauauugacgccgugaucgcuauagguguucugaucaggggagcaacuccacacuucgauuauauugccucugaagugucaaaggggcuagcugaccucagucuggagcuucggaaaccgaucacguuuggcgucauuaccgccgauacacuggaacaagcgaucgagcgcgcaggcacuaagcaugggaauaaaggaugggaggccgcuuugagcgccauagaaauggcaaaccucuucaagucccugagagguggcucugggggaucgggcgguucagggggaagcggcggcgggcuguuucaggaguaccagugcuauggaaguuccucuaauaccagggugcucaacgaauuaaauuacgacaacgcugguacaaaucuguauaacgagcuugaaaugaauuacuauggcaagcaggagaacugguacagcuugaaaaagaacucccggucacugggggagaaugaugacggaaauaacgaagauaaugagaaacuacgcaagcccaaacacaagaagcucaaacaaccugccgacggcaacccagaucccaacgcgaauccuaacguagacccaaaugccaaccccaauguugacccuaacgcaaauccaaacguggauccgaaugcuaaccccaaugccaacccuaaugcuaacccaaaugccaaccccaacgcaaauccuaacgccaauccaaacgcuaaucccaacgcgaauccgaacgcaaauccuaacgccaaucccaacgcuaauccaaacgccaauccuaacgcaaaccccaaugccaacccaaaugcuaaccccaaugccaacccuaaugcaaacccaaaugucgacccgaacgcgaaucccaacgcuaauccuaacgccaauccaaacgcaaaccccaaugccaacccuaaugcuaacccaaaugccaaccccaaugcaaacccgaaugcuaacccuaaugccaacccaaaugcgaaccccaaugccaacccuaaugcuaaccccaacgcaaauccaaacgccaauccuaacgcuaaucccaacgccaauccaaacgcaaauccgaacaagaauaaccaggguaaugggcagggccauaacaugccuaaugaucccaaccgaaacguggacgaaaaugcgaacgccaauagugcugugaaaaacaauaacaaugaggaaccaagcgauaagcacauuaaagaguaccugaacaagauccaaaauucucuuuccaccgaguggucacccugcagcgucacuugcggaaacggcauucagguuagaaucaaaccugggagugccaauaagccaaaggacgaacuggauuaugcaaacgacaucgagaaaaagauuuguaaaauggaaaaguguucuuccguguucaauguagugaacagcucgauaggauugaucaugguccucucuuuucuguucuuaaauugaggacuagucccuguucccagagcccacuuuuuuuucuuuuuuugaaauaaaauagccugucuuucagaucucaaaggcucuuuucagagccaccaaaaaaaaaaaaaaaaaaaaaaaaaaaaaaaaaaaaaaaaaaaaaaaaaaaaaaaaaaaaaaaaaaaaaaaaaaaaaaaaaaaaaaaaaaaaaaaaaaaaagaauu

SEQ ID NO: 9613 - RNA, 1883 nt, Artificial Sequence
  mRNA Design a-3 (hSL-A100-N5) comprising derived and/or modified sequence from Pf(3D7)__XP_001351122.1__HsALB_Pf-CSP(19-272)_L(PVTN)_HBsAg (opt3)
aggagagggcgcuuggcuugcaaggacccugagcugcggcauugaagcacacccaacccaacucgacugaagucagccucacugaaccggaucugagaaucuucucucucugggcuugccagggcucuccgaaccuagcuagcauccucuucaauuccaacuagaaagcuuaccaugaagugggugaccuucaucagccugcucuuucuuuucuccucugccuacucacuguuucaggaguaucaaugcuacggcaguagcuccaacacaagagucuugaaugaauuaaacuaugacaaugcugggacuaaccuguacaaugagcuagaaaugaacuauuacggaaaacaggagaauugguauucucucaagaaaaacucgaggucacugggugaaaaugaugacggcaacaaugaggauaacgagaaacuucggaagcccaagcacaagaaacugaagcagccugcagacgggaauccagauccgaacgccaaucccaacguugacccuaacgcgaauccaaacguggaucccaaugcuaacccuaauguagacccaaacgccaaucccaacgcaaauccuaacgccaauccaaacgcuaauccgaacgcaaaucccaacgccaacccuaaugcuaacccaaaugccaaccccaaugcgaacccuaaugcaaacccaaaugccaaccccaaugcuaacccgaaugccaacccuaaugcaaaccccaacgcuaauccaaacgccaauccuaacgcgaaucccaacguggauccaaaugccaaccccaaugcaaacccuaaugcuaacccaaaugccaacccgaaugcuaaccccaacgccaauccuaacgcaaauccaaacgccaaucccaacgcuaauccuaacgcgaauccaaacgcaaaucccaacgccaauccgaacgcuaauccuaacgccaauccaaacgcaaaccccaaugccaacccuaaugcuaaccccaaugccaacccaccugucacgaauauggaaaacauuaccagcggauucuugggcccccuccuggugcugcaggcaggguuuuuccucuuaacacgcauacugacuaucccacaaagucuugacuccugguggaccucuuugaauuuucuggguggaagcccgguuugucuaggccagaacucccagucaccuacaaguaaucauagccccaccucuugcccacccauuuguccuggcuaccgauggaugugccuccguagauucaucauuuuucuguucauccuucuguugugucucauauuucuguuagugcugcucgauuaccaggggaugcuuccagucugcccccugaucccuggauccacuacaaccaacacggguccguguaaaacuugcaccacaccagcgcaaggcaauucaauguuccccagcuguugcuguacuaagccuaccgacgggaacugcacaugcauuccaauccccaguucuugggcuuuugccaaauauuugugggagugggcauccgugagguucagcuggcuaucgcugcucguaccuuucguucagugguuugugggacugucuccgaccgucuggcuuuccgccauuuggaugaugugguacuggggccccucacuguauaguaucgugagcccauucauaccuuugcuccccaucuuuuucugucuguggguguacauuugaggacuagucccuguucccagagcccacuuuuuuuucuuuuuuugaaauaaaauagccugucuuucagaucucaaaggcucuuuucagagccaccaaaaaaaaaaaaaaaaaaaaaaaaaaaaaaaaaaaaaaaaaaaaaaaaaaaaaaaaaaaaaaaaaaaaaaaaaaaaaaaaaaaaaaaaaaaaaaaaaaaaagaauu

SEQ ID NO: 9614 - RNA, 2000 nt, Artificial Sequence
  mRNA Design a-3 (hSL-A100-N5) comprising derived and/or modified sequence from Pf(3D7)__XP_001351122.1__HsALB_Pf-CSP(19-272)_L(AAY)_Pf-CSP(346-3 65)_L(AAY)_PADRE_L(PVTN)_HBsAg (opt3)
aggagagggcgcuuggcuugcaaggacccugagcugcggcauugaagcacacccaacccaacucgacugaagucagccucacugaaccggaucugagaaucuucucucucugggcuugccagggcucuccgaaccuagcuagcauccucuucaauuccaacuagaaagcuuaccaugaagugggugaccuucaucagccugcucuuucuuuucuccucugccuacucacuguuucaggaguaucaaugcuacggcaguagcuccaacacaagagucuugaaugaauuaaacuaugacaaugcugggacuaaccuguacaaugagcuagaaaugaacuauuacggaaaacaggagaauugguauucucucaagaaaaacucgaggucacugggugaaaaugaugacggcaacaaugaggauaacgagaaacuucggaagcccaagcacaagaaacugaagcagccugcagacgggaauccagauccgaacgccaaucccaacguugacccuaacgcgaauccaaacguggaucccaaugcuaacccuaauguagacccaaacgccaaucccaacgcaaauccuaacgccaauccaaacgcuaauccgaacgcaaaucccaacgccaacccuaaugcuaacccaaaugccaaccccaaugcgaacccuaaugcaaacccaaaugccaaccccaaugcuaacccgaaugccaacccuaaugcaaaccccaacgcuaauccaaacgccaauccuaacgcgaaucccaacguggauccaaaugccaaccccaaugcaaacccuaaugcuaacccaaaugccaacccgaaugcuaaccccaacgccaauccuaacgcaaauccaaacgccaaucccaacgcuaauccuaacgcgaauccaaacgcaaaucccaacgccaauccgaacgcuaauccuaacgccaauccaaacgcaaaccccaaugccaacccuaaugcuaaccccaaugccaacccagcagcguacauuaaaccuggaagcgcuaauaagcccaaagacgaauuggauuacgccaacgacauagaggcagccuaugcuaaguucgucgccgcauggacgcucaaggcugccgcgccagugaccaauauggaaaacaucacaaguggcuuucuggguccgcugcucguuuuacaggccggguucuuucugcuuacucgcauuuugaccaucccucaaucccuggauucuugguggacaagccuaaauuuccucggaggcucccccgugugucugggccagaacucacagaguccaaccagcaaucauucucccacuuccugcccuccaauuugucccggguaccgauggaugugccuucguagauuuaucauauuccuguuuaucuugcuccuguguuuaauuuuccugcucguccuucuggacuaucagggaauguugccugugugcccgcuaaucccagguucaacaaccacgaacacuggccccuguaaaaccugcacaacuccugcucaagggaauagcauguuuccaaguuguugcuguaccaagcccacagacggaaacuguaccugcauuccuaucccgucuuccugggcauucgccaaauaccugugggagugggcuagcguaagguucucguggcucucucugcuuguucccuuugugcagugguucgucggccuguccccaacggugugguugucagccauauggaugaugugguauugggguccuagucucuacagcauugugucccccuuuaucccacuguuaccuauuuucuuuugccugugggucuauaucugaggacuagucccuguucccagagcccacuuuuuuuucuuuuuuugaaauaaaauagccugucuuucagaucucaaaggcucuuuucagagccaccaaaaaaaaaaaaaaaaaaaaaaaaaaaaaaaaaaaaaaaaaaaaaaaaaaaaaaaaaaaaaaaaaaaaaaaaaaaaaaaaaaaaaaaaaaaaaaaaaaaaagaauu

SEQ ID NO: 9615 - RNA, 2219 nt, Artificial Sequence
  mRNA Design a-3 (hSL-A100-N5) comprising derived and/or modified sequence from Pf(3D7)__XP_001351122.1__HsALB_Pf-CSP(19-384)_L(PVTN)_HBsAg (opt3)
aggagagggcgcuuggcuugcaaggacccugagcugcggcauugaagcacacccaacccaacucgacugaagucagccucacugaaccggaucugagaaucuucucucucugggcuugccagggcucuccgaaccuagcuagcauccucuucaauuccaacuagaaagcuuaccaugaagugggugaccuucaucagccugcucuuucuuuucuccucugccuacucacuguuucaggaguaucaaugcuacggcaguagcuccaacacaagagucuugaaugaauuaaacuaugacaaugcugggacuaaccuguacaaugagcuagaaaugaacuauuacggaaaacaggagaauugguauucucucaagaaaaacucgaggucacugggugaaaaugaugacggcaacaaugaggauaacgagaaacuucggaagcccaagcacaagaaacugaagcagccugcagacgggaauccagauccgaacgccaaucccaacguugacccuaacgcgaauccaaacguggaucccaaugcuaacccuaauguagacccaaacgccaaucccaacgcaaauccuaacgccaauccaaacgcuaauccgaacgcaaaucccaacgccaacccuaaugcuaacccaaaugccaaccccaaugcgaacccuaaugcaaacccaaaugccaaccccaaugcuaacccgaaugccaacccuaaugcaaaccccaacgcuaauccaaacgccaauccuaacgcgaaucccaacguggauccaaaugccaaccccaaugcaaacccuaaugcuaacccaaaugccaacccgaaugcuaaccccaacgccaauccuaacgcaaauccaaacgccaaucccaacgcuaauccuaacgcgaauccaaacgcaaaucccaacgccaauccgaacgcuaauccuaacgccaauccaaacgcaaaccccaaugccaacccuaaugcuaaccccaaugccaacccaaauaaaaacaaucagggaaacggccaaggucauaauaugccuaacgaccccaaucgcaacgucgaugaaaaugcaaacgcgaacagcgcugugaagaauaacaauaacgaggaaccaagugacaaacacauuaaggaguacuugaauaagauacagaacucccucucuacggaguggagcccguguuccguuaccugcgggaauggaauccaggugcgaauuaaaccuggcucagccaacaagcccaaagaugaacuggacuacgcaaaugacaucgagaagaaaauuuguaagauggaaaaaugcaguagcgucuucaacgugguaaauucuuccccaguuacaaacauggagaauaucacuucaggcuuucuggggccccucuuagugcugcaggccggauucuuucuuuugacccguauacugacaaucccucaaagccuagauaguugguggaccucucucaacuuccuggguggcuccccagucugucuugggcagaauagccagucgcccacuucuaaccauuccccuacaucaugcccgccaauuugucccggauauagauggaugugccugaggcgguuuaucauuuucuuguuuauccuccuguuaugucugauauuccuccuugugcuguuggacuaccagggcaugcuaccugugugcccacugauucccgguaguaccacgacuaacaccgggccuuguaagacaugcacuaccccggcucaaggaaauagcauguuucccuccugcuguugcacaaagccaaccgauggcaacuguacgugcaucccuauucccucuagcugggccuucgcaaaauaucucugggaaugggcuucaguccgcuucaguuggcugucccuucugguuccauuugugcagugguucguaggcuugagcccuacuguguggcucucugccaucuggaugaugugguacugggggcccucacuguauaguaucgucagcccauuuauuccguuacugccuauauucuuuugucuauggguguacaucugaggacuagucccuguucccagagcccacuuuuuuuucuuuuuuugaaauaaaauagccugucuuucagaucucaaaggcucuuuucagagccaccaaaaaaaaaaaaaaaaaaaaaaaaaaaaaaaaaaaaaaaaaaaaaaaaaaaaaaaaaaaaaaaaaaaaaaaaaaaaaaaaaaaaaaaaaaaaaaaaaaaaagaauu

SEQ ID NO: 9616 - RNA, 2036 nt, Artificial Sequence
  mRNA Design a-3 (hSL-A100-N5) comprising derived and/or modified sequence from Pf(3D7)__XP_001351122.1__HsALB_Pf-CSP(19-384)_L(SGG)_Ferritin (opt3)
aggagagggcgcuuggcuugcaaggacccugagcugcggcauugaagcacacccaacccaacucgacugaagucagccucacugaaccggaucugagaaucuucucucucugggcuugccagggcucuccgaaccuagcuagcauccucuucaauuccaacuagaaagcuuaccaugaagugggugaccuucaucagccugcucuuucuuuucuccucugccuacucacuguuucaggaguaucaaugcuacggcaguagcuccaacacaagagucuugaaugaauuaaacuaugacaaugcugggacuaaccuguacaaugagcuagaaaugaacuauuacggaaaacaggagaauugguauucucucaagaaaaacucgaggucacugggugaaaaugaugacggcaacaaugaggauaacgagaaacuucggaagcccaagcacaagaaacugaagcagccugcagacgggaauccagauccgaacgccaaucccaacguugacccuaacgcgaauccaaacguggaucccaaugcuaacccuaauguagacccaaacgccaaucccaacgcaaauccuaacgccaauccaaacgcuaauccgaacgcaaaucccaacgccaacccuaaugcuaacccaaaugccaaccccaaugcgaacccuaaugcaaacccaaaugccaaccccaaugcuaacccgaaugccaacccuaaugcaaaccccaacgcuaauccaaacgccaauccuaacgcgaaucccaacguggauccaaaugccaaccccaaugcaaacccuaaugcuaacccaaaugccaacccgaaugcuaaccccaacgccaauccuaacgcaaauccaaacgccaaucccaacgcuaauccuaacgcgaauccaaacgcaaaucccaacgccaauccgaacgcuaauccuaacgccaauccaaacgcaaaccccaaugccaacccuaaugcuaaccccaaugccaacccaaauaaaaacaaucagggaaacggccaaggucauaauaugccuaacgaccccaaucgcaacgucgaugaaaaugcaaacgcgaacagcgcugugaagaauaacaauaacgaggaaccaagugacaaacacauuaaggaguacuugaauaagauacagaacucccucucuacggaguggagcccguguuccguuaccugcgggaauggaauccaggugcgaauuaaaccuggcucagccaacaagcccaaagaugaacuggacuacgcaaaugacaucgagaagaaaauuuguaagauggaaaaaugcaguagcgucuucaacgugguaaauucuuccucaggcgggcugagcaaggauaucauaaagcucuuaaacgagcagguuaauaaagaaaugaacaguucuaaucuguauauguccaugagcucgugguguuacacacauucucuugacggagccgguuuguuucuguucgaucacgcugccgaggaguaugaacaugcaaagaaacuaaucauuuuucucaacgagaacaaugugccaguccaacugacuuccaucucagcucccgaacacaaguucgagggccuuacccagauuuuucagaaagccuacgaacacgagcagcauaucagugagagcauaaacaauauuguggaccacgcgaucaaguccaaggaucaugccacauucaacuuucugcaaugguauguggcugaacagcacgaggaagaggucuuguucaaagacauucucgauaagaucgaacugaucgggaaugagaaccacggauuauaccuggcagaccaguauguuaaaggcauugccaagucucguaaaagcugaggacuagucccuguucccagagcccacuuuuuuuucuuuuuuugaaauaaaauagccugucuuucagaucucaaaggcucuuuucagagccaccaaaaaaaaaaaaaaaaaaaaaaaaaaaaaaaaaaaaaaaaaaaaaaaaaaaaaaaaaaaaaaaaaaaaaaaaaaaaaaaaaaaaaaaaaaaaaaaaaaaaagaauu

SEQ ID NO: 9617 - RNA, 1997 nt, Artificial Sequence
  mRNA Design a-3 (hSL-A100-N5) comprising derived and/or modified sequence from Pf(3D7)__XP_001351122.1__HsALB_Pf-CSP(93-384)_L(PVTN)_HBsAg (opt3)
aggagagggcgcuuggcuugcaaggacccugagcugcggcauugaagcacacccaacccaacucgacugaagucagccucacugaaccggaucugagaaucuucucucucugggcuugccagggcucuccgaaccuagcuagcauccucuucaauuccaacuagaaagcuuaccaugaagugggugaccuucaucagccugcucuuucuuuucuccucugccuacucaaaacugaagcagcccgcugacggcaacccugauccaaaugcaaacccgaaugucgaccccaacgccaauccuaacguugauccaaaugcgaaccccaauguggacccuaacgcuaauccaaacgccaaucccaacgcaaauccuaacgccaacccaaaugcuaacccgaaugcaaaccccaaugccaacccuaaugcuaacccaaaugccaaccccaaugcgaacccuaaugcaaacccaaaugccaaccccaacgcuaauccgaacgccaauccuaacgcaaaucccaacgcuaauccaaacgccaauccuaacguagaucccaaugcgaacccaaaugccaaccccaaugcaaacccuaacgcuaauccaaacgccaauccgaacgcuaaucccaacgccaauccuaacgcaaauccaaacgccaaucccaacgcuaauccuaacgcgaauccaaacgcaaaccccaaugccaacccgaaugcuaacccuaaugccaacccaaaugcaaaccccaaugccaacccuaaugcuaaccccaauaaaaacaaucaagggaacggacagggucacaauaugccaaacgacccuaacagaaauguggaugagaacgccaaugcaaacagugcggucaagaauaacaauaacgaggaacccagcgacaaacauauuaaggaauauuugaauaagauacagaacuccuuaucuacagaguggucgccaugcucagugacuuguggcaaugggauccagguuaggauuaaaccgggaagcgcuaacaagccuaaagaugaacuggacuacgccaaugauaucgagaagaaaauuugcaagauggagaaguguaguuccguguuuaacgucguaaauucuagccccgugacgaacauggaaaacaucaccuccggcuuccuagguccacuccugguucuucaagcaggguuuuuccuguugacacggauacucacuaucccccagucacuggacaguugguggaccagccugaauuuucucggaggcucuccugugugcuuaggccagaacucccagucaccaacaagcaaucacagucccaccucuuguccuccgauuugcccaggguaucgcuggaugugucugcgacguuucaucauuuuucuuuucaucuugcugcuaugccucauauuucugcuuguccuguuggauuaccaaggaaugcuccccguguguccucugauuccagguuccacuacaaccaacacgggccccugcaaaacuuguaccacuccugcccaggggaauagcauguucccgucgugcugcuguacaaagcccaccgacggaaacugcacauguaucccaauuccuucuuccugggcuuuugccaaauauuuaugggagugggcaucagugagauucaguuggcugagccuccuuguccccuucguucagugguuugugggccuguccccaaccguaugguugucugcuaucuggaugaugugguacugggguccuagccuauauucaaucgugagucccuucauuccacugcucccgauauuuuucugccugugggucuacaucugaggacuagucccuguucccagagcccacuuuuuuuucuuuuuuugaaauaaaauagccugucuuucagaucucaaaggcucuuuucagagccaccaaaaaaaaaaaaaaaaaaaaaaaaaaaaaaaaaaaaaaaaaaaaaaaaaaaaaaaaaaaaaaaaaaaaaaaaaaaaaaaaaaaaaaaaaaaaaaaaaaaaagaauu

SEQ ID NO: 9618 - RNA, 1658 nt, Artificial Sequence; identical to SEQ ID NO: 7649
  mRNA Design a-3 (hSL-A100-N5) comprising derived and/or modified sequence from Pf(3D7)__XP_001351122.1__HsALB_Pf-CSP(199-377)_L(PVTN)_HBsAg (opt3)

SEQ ID NO: 9619 - RNA, 1355 nt, Artificial Sequence
  mRNA Design a-3 (hSL-A100-N5) comprising derived and/or modified sequence from Pf(3D7)__XP_001351122.1__HsALB_Pf-CSP(19-272)_L(AAY)_Pf-CSP(346-3 75)_L(AAY)_Pf-CSP(310-327) (opt3)
aggagagggcgcuuggcuugcaaggacccugagcugcggcauugaagcacacccaacccaacucgacugaagucagccucacugaaccggaucugagaaucuucucucucugggcuugccagggcucuccgaaccuagcuagcauccucuucaauuccaacuagaaagcuuaccaugaagugggugaccuucaucagccugcucuuucuuuucuccucugccuacucacuguuucaggaguaucaaugcuacggcaguagcuccaacacaagagucuugaaugaauuaaacuaugacaaugcugggacuaaccuguacaaugagcuagaaaugaacuauuacggaaaacaggagaauugguauucucucaagaaaaacucgaggucacugggugaaaaugaugacggcaacaaugaggauaacgagaaacuucggaagcccaagcacaagaaacugaagcagccugcagacgggaauccagauccgaacgccaaucccaacguugacccuaacgcgaauccaaacguggaucccaaugcuaacccuaauguagacccaaacgccaaucccaacgcaaauccuaacgccaauccaaacgcuaauccgaacgcaaaucccaacgccaacccuaaugcuaacccaaaugccaaccccaaugcgaacccuaaugcaaacccaaaugccaaccccaaugcuaacccgaaugccaacccuaaugcaaaccccaacgcuaauccaaacgccaauccuaacgcgaaucccaacguggauccaaaugccaaccccaaugcaaacccuaaugcuaacccaaaugccaacccgaaugcuaaccccaacgccaauccuaacgcaaauccaaacgccaaucccaacgcuaauccuaacgcgaauccaaacgcaaaucccaacgccaauccgaacgcuaauccuaacgccaauccaaacgcaaaccccaaugccaacccuaaugcuaaccccaaugccaacccagcagcguacauuaaaccuggaagcgcuaauaagcccaaagacgaauuggauuacgccaacgacauagagaagaagaucuguaaaauggaaaagugcagugcagccuaugagccauccgauaaacauauuaaggaguaccucaauaaaauccagaacucucugugaggacuagucccuguucccagagcccacuuuuuuuucuuuuuuugaaauaaaauagccugucuuucagaucucaaaggcucuuuucagagccaccaaaaaaaaaaaaaaaaaaaaaaaaaaaaaaaaaaaaaaaaaaaaaaaaaaaaaaaaaaaaaaaaaaaaaaaaaaaaaaaaaaaaaaaaaaaaaaaaaaaaagaauu

SEQ ID NO: 9620 - RNA, 1403 nt, Artificial Sequence
  mRNA Design a-3 (hSL-A100-N5) comprising derived and/or modified sequence from Pf(3D7)__XP_001351122.1__HsALB_Pf-CSP(19-272)_L(AAY)_Pf-CSP(346-3 75)_L(AAY)_Pf-CSP(310-327)_L(AAY)_PADRE (opt3)
aggagagggcgcuuggcuugcaaggacccugagcugcggcauugaagcacacccaacccaacucgacugaagucagccucacugaaccggaucugagaaucuucucucucugggcuugccagggcucuccgaaccuagcuagcauccucuucaauuccaacuagaaagcuuaccaugaagugggugaccuucaucagccugcucuuucuuuucuccucugccuacucacuguuucaggaguaucaaugcuacggcaguagcuccaacacaagagucuugaaugaauuaaacuaugacaaugcugggacuaaccuguacaaugagcuagaaaugaacuauuacggaaaacaggagaauugguauucucucaagaaaaacucgaggucacugggugaaaaugaugacggcaacaaugaggauaacgagaaacuucggaagcccaagcacaagaaacugaagcagccugcagacgggaauccagauccgaacgccaaucccaacguugacccuaacgcgaauccaaacguggaucccaaugcuaacccuaauguagacccaaacgccaaucccaacgcaaauccuaacgccaauccaaacgcuaauccgaacgcaaaucccaacgccaacccuaaugcuaacccaaaugccaaccccaaugcgaacccuaaugcaaacccaaaugccaaccccaaugcuaacccgaaugccaacccuaaugcaaaccccaacgcuaauccaaacgccaauccuaacgcgaaucccaacguggauccaaaugccaaccccaaugcaaacccuaaugcuaacccaaaugccaacccgaaugcuaaccccaacgccaauccuaacgcaaauccaaacgccaaucccaacgcuaauccuaacgcgaauccaaacgcaaaucccaacgccaauccgaacgcuaauccuaacgccaauccaaacgcaaaccccaaugccaacccuaaugcuaaccccaaugccaacccagcagcguacauuaaaccuggaagcgcuaauaagcccaaagacgaauuggauuacgccaacgacauagagaagaagaucuguaaaauggaaaagugcagugcagccuaugagccauccgauaaacauauuaaggaguaccucaauaaaauccagaacucucuggcugccuaugcaaaguucgucgcugccuggacgcugaaagcggccgcuugaggacuagucccuguucccagagcccacuuuuuuuucuuuuuuugaaauaaaauagccugucuuucagaucucaaaggcucuuuucagagccaccaaaaaaaaaaaaaaaaaaaaaaaaaaaaaaaaaaaaaaaaaaaaaaaaaaaaaaaaaaaaaaaaaaaaaaaaaaaaaaaaaaaaaaaaaaaaaaaaaaaaagaauu

SEQ ID NO: 9621 - RNA, 1403 nt, Artificial Sequence
  mRNA Design a-3 (hSL-A100-N5) comprising derived and/or modified sequence from Pf(3D7)__XP_001351122.1__HsALB_Pf-CSP(19-272)_L(AAY)_Pf-CSP(310-3 27)_L(AAY)_Pf-CSP(346-375)_L(AAY)_PADRE (opt3)
aggagagggcgcuuggcuugcaaggacccugagcugcggcauugaagcacacccaacccaacucgacugaagucagccucacugaaccggaucugagaaucuucucucucugggcuugccagggcucuccgaaccuagcuagcauccucuucaauuccaacuagaaagcuuaccaugaagugggugaccuucaucagccugcucuuucuuuucuccucugccuacucacuguuucaggaguaucaaugcuacggcaguagcuccaacacaagagucuugaaugaauuaaacuaugacaaugcugggacuaaccuguacaaugagcuagaaaugaacuauuacggaaaacaggagaauugguauucucucaagaaaaacucgaggucacugggugaaaaugaugacggcaacaaugaggauaacgagaaacuucggaagcccaagcacaagaaacugaagcagccugcagacgggaauccagauccgaacgccaaucccaacguugacccuaacgcgaauccaaacguggaucccaaugcuaacccuaauguagacccaaacgccaaucccaacgcaaauccuaacgccaauccaaacgcuaauccgaacgcaaaucccaacgccaacccuaaugcuaacccaaaugccaaccccaaugcgaacccuaaugcaaacccaaaugccaaccccaaugcuaacccgaaugccaacccuaaugcaaaccccaacgcuaauccaaacgccaauccuaacgcgaaucccaacguggauccaaaugccaaccccaaugcaaacccuaaugcuaacccaaaugccaacccgaaugcuaaccccaacgccaauccuaacgcaaauccaaacgccaaucccaacgcuaauccuaacgcgaauccaaacgcaaaucccaacgccaauccgaacgcuaauccuaacgccaauccaaacgcaaaccccaaugccaacccuaaugcuaaccccaaugccaacccagcagcguacgaaccuagcgacaaacauauuaaggaguacuugaauaaaauacagaacagucucgcugccuauaucaagcccggauccgcaaauaagccaaaagaugaacuggacuacgccaacgauauugagaagaaaaucuguaagauggagaaaugcucugcugccuaugcaaaguucgucgcugccuggacgcugaaagcggccgcuugaggacuagucccuguucccagagcccacuuuuuuuucuuuuuuugaaauaaaauagccugucuuucagaucucaaaggcucuuuucagagccaccaaaaaaaaaaaaaaaaaaaaaaaaaaaaaaaaaaaaaaaaaaaaaaaaaaaaaaaaaaaaaaaaaaaaaaaaaaaaaaaaaaaaaaaaaaaaaaaaaaaaagaauu

SEQ ID NO: 9622 - RNA, 1457 nt, Artificial Sequence
  mRNA Design a-3 (hSL-A100-N5) comprising derived and/or modified sequence from Pf(3D7)__XP_001351122.1__HsALB_Pf-CSP(19-272)_L(AAY)_Pf-CSP(310-3 27)_L(AAY)_Pf-CSP(346-375)_L(AAY)_PADRE_L(AAY)_P2 (opt3)
aggagagggcgcuuggcuugcaaggacccugagcugcggcauugaagcacacccaacccaacucgacugaagucagccucacugaaccggaucugagaaucuucucucucugggcuugccagggcucuccgaaccuagcuagcauccucuucaauuccaacuagaaagcuuaccaugaagugggugaccuucaucagccugcucuuucuuuucuccucugccuacucacuguuucaggaguaucaaugcuacggcaguagcuccaacacaagagucuugaaugaauuaaacuaugacaaugcugggacuaaccuguacaaugagcuagaaaugaacuauuacggaaaacaggagaauugguauucucucaagaaaaacucgaggucacugggugaaaaugaugacggcaacaaugaggauaacgagaaacuucggaagcccaagcacaagaaacugaagcagccugcagacgggaauccagauccgaacgccaaucccaacguugacccuaacgcgaauccaaacguggaucccaaugcuaacccuaauguagacccaaacgccaaucccaacgcaaauccuaacgccaauccaaacgcuaauccgaacgcaaaucccaacgccaacccuaaugcuaacccaaaugccaaccccaaugcgaacccuaaugcaaacccaaaugccaaccccaaugcuaacccgaaugccaacccuaaugcaaaccccaacgcuaauccaaacgccaauccuaacgcgaaucccaacguggauccaaaugccaaccccaaugcaaacccuaaugcuaacccaaaugccaacccgaaugcuaaccccaacgccaauccuaacgcaaauccaaacgccaaucccaacgcuaauccuaacgcgaauccaaacgcaaaucccaacgccaauccgaacgcuaauccuaacgccaauccaaacgcaaaccccaaugccaacccuaaugcuaaccccaaugccaacccagcagcguacgaaccuagcgacaaacauauuaaggaguacuugaauaaaauacagaacagucucgcugccuauaucaagcccggauccgcaaauaagccaaaagaugaacuggacuacgccaacgauauugagaagaaaaucuguaagauggagaaaugcucugcugccuaugcaaaguucgucgcugccuggacgcugaaagcggccgcugcagccuaccaauauauuaaggcuaauagcaaguuuaucggcauaaccgaacucugaggacuagucccuguucccagagcccacuuuuuuuucuuuuuuugaaauaaaauagccugucuuucagaucucaaaggcucuuuucagagccaccaaaaaaaaaaaaaaaaaaaaaaaaaaaaaaaaaaaaaaaaaaaaaaaaaaaaaaaaaaaaaaaaaaaaaaaaaaaaaaaaaaaaaaaaaaaaaaaaaaaaagaauu

SEQ ID NO: 9623 - RNA, 1421 nt, Artificial Sequence
  mRNA Design a-3 (hSL-A100-N5) comprising derived and/or modified sequence from Pf(3D7)__XP_001351122.1__HsALB_Pf-CSP(19-272)_L(AAY)_Pf-CSP(310-3 27)_Linker (AAY)_Pf-CSP(346-397) (opt3)
aggagagggcgcuuggcuugcaaggacccugagcugcggcauugaagcacacccaacccaacucgacugaagucagccucacugaaccggaucugagaaucuucucucucugggcuugccagggcucuccgaaccuagcuagcauccucuucaauuccaacuagaaagcuuaccaugaagugggugaccuucaucagccugcucuuucuuuucuccucugccuacucacuguuucaggaguaucaaugcuacggcaguagcuccaacacaagagucuugaaugaauuaaacuaugacaaugcugggacuaaccuguacaaugagcuagaaaugaacuauuacggaaaacaggagaauugguauucucucaagaaaaacucgaggucacugggugaaaaugaugacggcaacaaugaggauaacgagaaguuacggaaacccaagcacaagaaacugaagcagccugcagacgggaauccagauccgaacgccaaucccaacguugacccuaacgcgaauccaaacguggaucccaaugcuaacccuaauguagacccaaacgccaaucccaacgcaaauccuaacgccaauccaaacgcuaauccgaacgcaaaucccaacgccaacccuaaugcuaacccaaaugccaaccccaaugcgaacccuaaugcaaacccaaaugccaaccccaaugcuaacccgaaugccaacccuaaugcaaaccccaacgcuaauccaaacgccaauccuaacgcgaaucccaacguggauccaaaugccaaccccaaugcaaacccuaaugcuaacccaaaugccaacccgaaugcuaaccccaacgccaauccuaacgcaaauccaaacgccaaucccaacgcuaauccuaacgcgaauccaaacgcaaaucccaacgccaauccgaacgcuaauccuaacgccaauccaaacgcaaaccccaaugccaacccuaaugcuaaccccaaugccaacccagcagcguacgaaccuagcgacaaacauauuaaggaguacuugaauaaaauacagaacagucucgcugccuauaucaagcccggauccgcaaauaagccaaaagaugaacuggacuacgccaacgauauugagaagaaaaucuguaagauggagaaaugcucuagcgucuucaaugugguuaacuccucaauuggccugaucauggugcucaguuuucuuuuccugaauugaggacuagucccuguucccagagcccacuuuuuuuucuuuuuuugaaauaaaauagccugucuuucagaucucaaaggcucuuuucagagccaccaaaaaaaaaaaaaaaaaaaaaaaaaaaaaaaaaaaaaaaaaaaaaaaaaaaaaaaaaaaaaaaaaaaaaaaaaaaaaaaaaaaaaaaaaaaaaaaaaaaaagaauu

SEQ ID NO: 9624 - RNA, 2021 nt, Artificial Sequence
  mRNA Design a-3 (hSL-A100-N5) comprising derived and/or modified sequence from Pf(3D7)__XP_001351122.1__LumSynt_L(GGS4-GGG)_Pf-CSP(19-397) (opt4)
aggagagggcgcuuggcuugcaaggacccugagcugcggcauugaagcacacccaacccaacucgacugaagucagccucacugaaccggaucugagaaucuucucucucugggcuugccagggcucuccgaaccuagcuagcauccucuucaauuccaacuagaaagcuuaccaugcagaucuacgagggcaagcugaccgccgagggccugagauucggcaucguggccagcagauucaaccacgcccugguggacagacugguggagggcgccaucgacgccaucgugagacacggcggcagagaggaggacaucacccuggugagagugcccggcagcugggagauccccguggccgccggcgagcuggccagaaaggaggacaucgacgccgugaucgccaucggcgugcugaucagaggcgccaccccccacuucgacuacaucgccagcgaggugagcaagggccuggccgaccugagccuggagcugagaaagcccaucaccuucggcgugaucaccgccgacacccuggagcaggccaucgagagagccggcaccaagcacggcaacaagggcugggaggccgcccugagcgccaucgagauggccaaccuguucaagagccugagaggcggcagcggcggcagcggcggcagcggcggcagcggcggcggccuguuccaggaguaccagugcuacggcagcagcagcaacaccagagugcugaacgagcugaacuacgacaacgccggcaccaaccuguacaacgagcuggagaugaacuacuacggcaagcaggagaacugguacagccugaagaagaacagcagaagccugggcgagaacgacgacggcaacaacgaggacaacgagaagcugagaaagcccaagcacaagaagcugaagcagcccgccgacggcaaccccgaccccaacgccaaccccaacguggaccccaacgccaaccccaacguggaccccaacgccaaccccaacguggaccccaacgccaaccccaacgccaaccccaacgccaaccccaacgccaaccccaacgccaaccccaacgccaaccccaacgccaaccccaacgccaaccccaacgccaaccccaacgccaaccccaacgccaaccccaacgccaaccccaacgccaaccccaacgccaaccccaacgccaaccccaacgccaaccccaacgccaaccccaacguggaccccaacgccaaccccaacgccaaccccaacgccaaccccaacgccaaccccaacgccaaccccaacgccaaccccaacgccaaccccaacgccaaccccaacgccaaccccaacgccaaccccaacgccaaccccaacgccaaccccaacgccaaccccaacgccaaccccaacgccaaccccaacgccaaccccaacgccaaccccaacgccaaccccaacaagaacaaccagggcaacggccagggccacaacaugcccaacgaccccaacagaaacguggacgagaacgccaacgccaacagcgccgugaagaacaacaacaacgaggagcccagcgacaagcacaucaaggaguaccugaacaagauccagaacagccugagcaccgaguggagccccugcagcgugaccugcggcaacggcauccaggugagaaucaagcccggcagcgccaacaagcccaaggacgagcuggacuacgccaacgacaucgagaagaagaucugcaagauggagaagugcagcagcguguucaacguggugaacagcagcaucggccugaucauggugcugagcuuccuguuccugaacugaggacuagucccuguucccagagcccacuuuuuuuucuuuuuuugaaauaaaauagccugucuuucagaucucaaaggcucuuuucagagccaccaaaaaaaaaaaaaaaaaaaaaaaaaaaaaaaaaaaaaaaaaaaaaaaaaaaaaaaaaaaaaaaaaaaaaaaaaaaaaaaaaaaaaaaaaaaaaaaaaaaaagaauu

SEQ ID NO: 9625 - RNA, 1883 nt, Artificial Sequence
  mRNA Design a-3 (hSL-A100-N5) comprising derived and/or modified sequence from Pf(3D7)__XP_001351122.1__HsALB_Pf-CSP(19-272)_L(PVTN)_HBsAg (opt4)
aggagagggcgcuuggcuugcaaggacccugagcugcggcauugaagcacacccaacccaacucgacugaagucagccucacugaaccggaucugagaaucuucucucucugggcuugccagggcucuccgaaccuagcuagcauccucuucaauuccaacuagaaagcuuaccaugaagugggugaccuucaucagccugcuguuccuguucagcagcgccuacagccuguuccaggaguaccagugcuacggcagcagcagcaacaccagagugcugaacgagcugaacuacgacaacgccggcaccaaccuguacaacgagcuggagaugaacuacuacggcaagcaggagaacugguacagccugaagaagaacagcagaagccugggcgagaacgacgacggcaacaacgaggacaacgagaagcugagaaagcccaagcacaagaagcugaagcagcccgccgacggcaaccccgaccccaacgccaaccccaacguggaccccaacgccaaccccaacguggaccccaacgccaaccccaacguggaccccaacgccaaccccaacgccaaccccaacgccaaccccaacgccaaccccaacgccaaccccaacgccaaccccaacgccaaccccaacgccaaccccaacgccaaccccaacgccaaccccaacgccaaccccaacgccaaccccaacgccaaccccaacgccaaccccaacgccaaccccaacgccaaccccaacgccaaccccaacguggaccccaacgccaaccccaacgccaaccccaacgccaaccccaacgccaaccccaacgccaaccccaacgccaaccccaacgccaaccccaacgccaaccccaacgccaaccccaacgccaaccccaacgccaaccccaacgccaaccccaacgccaaccccaacgccaaccccaacgccaaccccaacgccaaccccaacgccaaccccaacgccaacccccccgugaccaacauggagaacaucaccagcggcuuccugggcccccugcuggugcugcaggccggcuucuuccugcugaccagaauccugaccaucccccagagccuggacagcugguggaccagccugaacuuccugggcggcagccccgugugccugggccagaacagccagagccccaccagcaaccacagccccaccagcugcccccccaucugccccggcuacagauggaugugccugagaagauucaucaucuuccuguucauccugcugcugugccugaucuuccugcuggugcugcuggacuaccagggcaugcugcccgugugcccccugauccccggcagcaccaccaccaacaccggccccugcaagaccugcaccacccccgcccagggcaacagcauguuccccagcugcugcugcaccaagcccaccgacggcaacugcaccugcauccccauccccagcagcugggccuucgccaaguaccugugggagugggccagcgugagauucagcuggcugagccugcuggugcccuucgugcagugguucgugggccugagccccaccguguggcugagcgccaucuggaugaugugguacuggggccccagccuguacagcaucgugagccccuucaucccccugcugcccaucuucuucugccuguggguguacaucugaggacuagucccuguucccagagcccacuuuuuuuucuuuuuuugaaauaaaauagccugucuuucagaucucaaaggcucuuuucagagccaccaaaaaaaaaaaaaaaaaaaaaaaaaaaaaaaaaaaaaaaaaaaaaaaaaaaaaaaaaaaaaaaaaaaaaaaaaaaaaaaaaaaaaaaaaaaaaaaaaaaaagaauu

SEQ ID NO: 9626 - RNA, 2000 nt, Artificial Sequence
  mRNA Design a-3 (hSL-A100-N5) comprising derived and/or modified sequence from Pf(3D7)__XP_001351122.1__HsALB_Pf-CSP(19-272)_L(AAY)_Pf-CSP(346-3 65)_L(AAY)_PADRE_L(PVTN)_HBsAg (opt4)
aggagagggcgcuuggcuugcaaggacccugagcugcggcauugaagcacacccaacccaacucgacugaagucagccucacugaaccggaucugagaaucuucucucucugggcuugccagggcucuccgaaccuagcuagcauccucuucaauuccaacuagaaagcuuaccaugaagugggugaccuucaucagccugcuguuccuguucagcagcgccuacagccuguuccaggaguaccagugcuacggcagcagcagcaacaccagagugcugaacgagcugaacuacgacaacgccggcaccaaccuguacaacgagcuggagaugaacuacuacggcaagcaggagaacugguacagccugaagaagaacagcagaagccugggcgagaacgacgacggcaacaacgaggacaacgagaagcugagaaagcccaagcacaagaagcugaagcagcccgccgacggcaaccccgaccccaacgccaaccccaacguggaccccaacgccaaccccaacguggaccccaacgccaaccccaacguggaccccaacgccaaccccaacgccaaccccaacgccaaccccaacgccaaccccaacgccaaccccaacgccaaccccaacgccaaccccaacgccaaccccaacgccaaccccaacgccaaccccaacgccaaccccaacgccaaccccaacgccaaccccaacgccaaccccaacgccaaccccaacgccaaccccaacgccaaccccaacguggaccccaacgccaaccccaacgccaaccccaacgccaaccccaacgccaaccccaacgccaaccccaacgccaaccccaacgccaaccccaacgccaaccccaacgccaaccccaacgccaaccccaacgccaaccccaacgccaaccccaacgccaaccccaacgccaaccccaacgccaaccccaacgccaaccccaacgccaaccccaacgccaaccccgccgccuacaucaagcccggcagcgccaacaagcccaaggacgagcuggacuacgccaacgacaucgaggccgccuacgccaaguucguggccgccuggacccugaaggccgccgcccccgugaccaacauggagaacaucaccagcggcuuccugggcccccugcuggugcugcaggccggcuucuuccugcugaccagaauccugaccaucccccagagccuggacagcugguggaccagccugaacuuccugggcggcagccccgugugccugggccagaacagccagagccccaccagcaaccacagccccaccagcugcccccccaucugccccggcuacagauggaugugccugagaagauucaucaucuuccuguucauccugcugcugugccugaucuuccugcuggugcugcuggacuaccagggcaugcugcccgugugcccccugauccccggcagcaccaccaccaacaccggccccugcaagaccugcaccacccccgcccagggcaacagcauguuccccagcugcugcugcaccaagcccaccgacggcaacugcaccugcauccccauccccagcagcugggccuucgccaaguaccugugggagugggccagcgugagauucagcuggcugagccugcuggugcccuucgugcagugguucgugggccugagccccaccguguggcugagcgccaucuggaugaugugguacuggggccccagccuguacagcaucgugagccccuucaucccccugcugcccaucuucuucugccuguggguguacaucugaggacuagucccuguucccagagcccacuuuuuuuucuuuuuuugaaauaaaauagccugucuuucagaucucaaaggcucuuuucagagccaccaaaaaaaaaaaaaaaaaaaaaaaaaaaaaaaaaaaaaaaaaaaaaaaaaaaaaaaaaaaaaaaaaaaaaaaaaaaaaaaaaaaaaaaaaaaaaaaaaaaaagaauu

SEQ ID NO: 9627 - RNA, 2219 nt, Artificial Sequence
  mRNA Design a-3 (hSL-A100-N5) comprising derived and/or modified sequence from Pf(3D7)__XP_001351122.1__HsALB_Pf-CSP(19-384)_L(PVTN)_HBsAg (opt4)
aggagagggcgcuuggcuugcaaggacccugagcugcggcauugaagcacacccaacccaacucgacugaagucagccucacugaaccggaucugagaaucuucucucucugggcuugccagggcucuccgaaccuagcuagcauccucuucaauuccaacuagaaagcuuaccaugaagugggugaccuucaucagccugcuguuccuguucagcagcgccuacagccuguuccaggaguaccagugcuacggcagcagcagcaacaccagagugcugaacgagcugaacuacgacaacgccggcaccaaccuguacaacgagcuggagaugaacuacuacggcaagcaggagaacugguacagccugaagaagaacagcagaagccugggcgagaacgacgacggcaacaacgaggacaacgagaagcugagaaagcccaagcacaagaagcugaagcagcccgccgacggcaaccccgaccccaacgccaaccccaacguggaccccaacgccaaccccaacguggaccccaacgccaaccccaacguggaccccaacgccaaccccaacgccaaccccaacgccaaccccaacgccaaccccaacgccaaccccaacgccaaccccaacgccaaccccaacgccaaccccaacgccaaccccaacgccaaccccaacgccaaccccaacgccaaccccaacgccaaccccaacgccaaccccaacgccaaccccaacgccaaccccaacgccaaccccaacguggaccccaacgccaaccccaacgccaaccccaacgccaaccccaacgccaaccccaacgccaaccccaacgccaaccccaacgccaaccccaacgccaaccccaacgccaaccccaacgccaaccccaacgccaaccccaacgccaaccccaacgccaaccccaacgccaaccccaacgccaaccccaacgccaaccccaacgccaaccccaacgccaaccccaacaagaacaaccagggcaacggccagggccacaacaugcccaacgaccccaacagaaacguggacgagaacgccaacgccaacagcgccgugaagaacaacaacaacgaggagcccagcgacaagcacaucaaggaguaccugaacaagauccagaacagccugagcaccgaguggagccccugcagcgugaccugcggcaacggcauccaggugagaaucaagcccggcagcgccaacaagcccaaggacgagcuggacuacgccaacgacaucgagaagaagaucugcaagauggagaagugcagcagcguguucaacguggugaacagcagccccgugaccaacauggagaacaucaccagcggcuuccugggcccccugcuggugcugcaggccggcuucuuccugcugaccagaauccugaccaucccccagagccuggacagcugguggaccagccugaacuuccugggcggcagccccgugugccugggccagaacagccagagccccaccagcaaccacagccccaccagcugcccccccaucugccccggcuacagauggaugugccugagaagauucaucaucuuccuguucauccugcugcugugccugaucuuccugcuggugcugcuggacuaccagggcaugcugcccgugugcccccugauccccggcagcaccaccaccaacaccggccccugcaagaccugcaccacccccgcccagggcaacagcauguuccccagcugcugcugcaccaagcccaccgacggcaacugcaccugcauccccauccccagcagcugggccuucgccaaguaccugugggagugggccagcgugagauucagcuggcugagccugcuggugcccuucgugcagugguucgugggccugagccccaccguguggcugagcgccaucuggaugaugugguacuggggccccagccuguacagcaucgugagccccuucaucccccugcugcccaucuucuucugccuguggguguacaucugaggacuagucccuguucccagagcccacuuuuuuuucuuuuuuugaaauaaaauagccugucuuucagaucucaaaggcucuuuucagagccaccaaaaaaaaaaaaaaaaaaaaaaaaaaaaaaaaaaaaaaaaaaaaaaaaaaaaaaaaaaaaaaaaaaaaaaaaaaaaaaaaaaaaaaaaaaaaaaaaaaaaagaauu

SEQ ID NO: 9628 - RNA, 2036 nt, Artificial Sequence
  mRNA Design a-3 (hSL-A100-N5) comprising derived and/or modified sequence from Pf(3D7)__XP_001351122.1__HsALB_Pf-CSP(19-384)_L(SGG)_Ferritin (opt4)
aggagagggcgcuuggcuugcaaggacccugagcugcggcauugaagcacacccaacccaacucgacugaagucagccucacugaaccggaucugagaaucuucucucucugggcuugccagggcucuccgaaccuagcuagcauccucuucaauuccaacuagaaagcuuaccaugaagugggugaccuucaucagccugcuguuccuguucagcagcgccuacagccuguuccaggaguaccagugcuacggcagcagcagcaacaccagagugcugaacgagcugaacuacgacaacgccggcaccaaccuguacaacgagcuggagaugaacuacuacggcaagcaggagaacugguacagccugaagaagaacagcagaagccugggcgagaacgacgacggcaacaacgaggacaacgagaagcugagaaagcccaagcacaagaagcugaagcagcccgccgacggcaaccccgaccccaacgccaaccccaacguggaccccaacgccaaccccaacguggaccccaacgccaaccccaacguggaccccaacgccaaccccaacgccaaccccaacgccaaccccaacgccaaccccaacgccaaccccaacgccaaccccaacgccaaccccaacgccaaccccaacgccaaccccaacgccaaccccaacgccaaccccaacgccaaccccaacgccaaccccaacgccaaccccaacgccaaccccaacgccaaccccaacgccaaccccaacguggaccccaacgccaaccccaacgccaaccccaacgccaaccccaacgccaaccccaacgccaaccccaacgccaaccccaacgccaaccccaacgccaaccccaacgccaaccccaacgccaaccccaacgccaaccccaacgccaaccccaacgccaaccccaacgccaaccccaacgccaaccccaacgccaaccccaacgccaaccccaacgccaaccccaacaagaacaaccagggcaacggccagggccacaacaugcccaacgaccccaacagaaacguggacgagaacgccaacgccaacagcgccgugaagaacaacaacaacgaggagcccagcgacaagcacaucaaggaguaccugaacaagauccagaacagccugagcaccgaguggagccccugcagcgugaccugcggcaacggcauccaggugagaaucaagcccggcagcgccaacaagcccaaggacgagcuggacuacgccaacgacaucgagaagaagaucugcaagauggagaagugcagcagcguguucaacguggugaacagcagcagcggcggccugagcaaggacaucaucaagcugcugaacgagcaggugaacaaggagaugaacagcagcaaccuguacaugagcaugagcagcuggugcuacacccacagccuggacggcgccggccuguuccuguucgaccacgccgccgaggaguacgagcacgccaagaagcugaucaucuuccugaacgagaacaacgugcccgugcagcugaccagcaucagcgcccccgagcacaaguucgagggccugacccagaucuuccagaaggccuacgagcacgagcagcacaucagcgagagcaucaacaacaucguggaccacgccaucaagagcaaggaccacgccaccuucaacuuccugcagugguacguggccgagcagcacgaggaggaggugcuguucaaggacauccuggacaagaucgagcugaucggcaacgagaaccacggccuguaccuggccgaccaguacgugaagggcaucgccaagagcagaaagagcugaggacuagucccuguucccagagcccacuuuuuuuucuuuuuuugaaauaaaauagccugucuuucagaucucaaaggcucuuuucagagccaccaaaaaaaaaaaaaaaaaaaaaaaaaaaaaaaaaaaaaaaaaaaaaaaaaaaaaaaaaaaaaaaaaaaaaaaaaaaaaaaaaaaaaaaaaaaaaaaaaaaaagaauu

SEQ ID NO: 9629 - RNA, 1997 nt, Artificial Sequence
  mRNA Design a-3 (hSL-A100-N5) comprising derived and/or modified sequence from Pf(3D7)__XP_001351122.1__HsALB_Pf-CSP(93-384)_L(PVTN)_HBsAg (opt4)
aggagagggcgcuuggcuugcaaggacccugagcugcggcauugaagcacacccaacccaacucgacugaagucagccucacugaaccggaucugagaaucuucucucucugggcuugccagggcucuccgaaccuagcuagcauccucuucaauuccaacuagaaagcuuaccaugaagugggugaccuucaucagccugcuguuccuguucagcagcgccuacagcaagcugaagcagcccgccgacggcaaccccgaccccaacgccaaccccaacguggaccccaacgccaaccccaacguggaccccaacgccaaccccaacguggaccccaacgccaaccccaacgccaaccccaacgccaaccccaacgccaaccccaacgccaaccccaacgccaaccccaacgccaaccccaacgccaaccccaacgccaaccccaacgccaaccccaacgccaaccccaacgccaaccccaacgccaaccccaacgccaaccccaacgccaaccccaacgccaaccccaacgccaaccccaacguggaccccaacgccaaccccaacgccaaccccaacgccaaccccaacgccaaccccaacgccaaccccaacgccaaccccaacgccaaccccaacgccaaccccaacgccaaccccaacgccaaccccaacgccaaccccaacgccaaccccaacgccaaccccaacgccaaccccaacgccaaccccaacgccaaccccaacgccaaccccaacgccaaccccaacaagaacaaccagggcaacggccagggccacaacaugcccaacgaccccaacagaaacguggacgagaacgccaacgccaacagcgccgugaagaacaacaacaacgaggagcccagcgacaagcacaucaaggaguaccugaacaagauccagaacagccugagcaccgaguggagccccugcagcgugaccugcggcaacggcauccaggugagaaucaagcccggcagcgccaacaagcccaaggacgagcuggacuacgccaacgacaucgagaagaagaucugcaagauggagaagugcagcagcguguucaacguggugaacagcagccccgugaccaacauggagaacaucaccagcggcuuccugggcccccugcuggugcugcaggccggcuucuuccugcugaccagaauccugaccaucccccagagccuggacagcugguggaccagccugaacuuccugggcggcagccccgugugccugggccagaacagccagagccccaccagcaaccacagccccaccagcugcccccccaucugccccggcuacagauggaugugccugagaagauucaucaucuuccuguucauccugcugcugugccugaucuuccugcuggugcugcuggacuaccagggcaugcugcccgugugcccccugauccccggcagcaccaccaccaacaccggccccugcaagaccugcaccacccccgcccagggcaacagcauguuccccagcugcugcugcaccaagcccaccgacggcaacugcaccugcauccccauccccagcagcugggccuucgccaaguaccugugggagugggccagcgugagauucagcuggcugagccugcuggugcccuucgugcagugguucgugggccugagccccaccguguggcugagcgccaucuggaugaugugguacuggggccccagccuguacagcaucgugagccccuucaucccccugcugcccaucuucuucugccuguggguguacaucugaggacuagucccuguucccagagcccacuuuuuuuucuuuuuuugaaauaaaauagccugucuuucagaucucaaaggcucuuuucagagccaccaaaaaaaaaaaaaaaaaaaaaaaaaaaaaaaaaaaaaaaaaaaaaaaaaaaaaaaaaaaaaaaaaaaaaaaaaaaaaaaaaaaaaaaaaaaaaaaaaaaaagaauu

SEQ ID NO: 9630 - RNA, 1658 nt, Artificial Sequence; identical to SEQ ID NO: 7679
  mRNA Design a-3 (hSL-A100-N5) comprising derived and/or modified sequence from Pf(3D7)__XP_001351122.1__HsALB_Pf-CSP(199-377)_L(PVTN)_HBsAg (opt4)

SEQ ID NO: 9631 - RNA, 1355 nt, Artificial Sequence
  mRNA Design a-3 (hSL-A100-N5) comprising derived and/or modified sequence from Pf(3D7)__XP_001351122.1__HsALB_Pf-CSP(19-272)_L(AAY)_Pf-CSP(346-3 75)_L(AAY)_Pf-CSP(310-327) (opt4)
aggagagggcgcuuggcuugcaaggacccugagcugcggcauugaagcacacccaacccaacucgacugaagucagccucacugaaccggaucugagaaucuucucucucugggcuugccagggcucuccgaaccuagcuagcauccucuucaauuccaacuagaaagcuuaccaugaagugggugaccuucaucagccugcuguuccuguucagcagcgccuacagccuguuccaggaguaccagugcuacggcagcagcagcaacaccagagugcugaacgagcugaacuacgacaacgccggcaccaaccuguacaacgagcuggagaugaacuacuacggcaagcaggagaacugguacagccugaagaagaacagcagaagccugggcgagaacgacgacggcaacaacgaggacaacgagaagcugagaaagcccaagcacaagaagcugaagcagcccgccgacggcaaccccgaccccaacgccaaccccaacguggaccccaacgccaaccccaacguggaccccaacgccaaccccaacguggaccccaacgccaaccccaacgccaaccccaacgccaaccccaacgccaaccccaacgccaaccccaacgccaaccccaacgccaaccccaacgccaaccccaacgccaaccccaacgccaaccccaacgccaaccccaacgccaaccccaacgccaaccccaacgccaaccccaacgccaaccccaacgccaaccccaacgccaaccccaacguggaccccaacgccaaccccaacgccaaccccaacgccaaccccaacgccaaccccaacgccaaccccaacgccaaccccaacgccaaccccaacgccaaccccaacgccaaccccaacgccaaccccaacgccaaccccaacgccaaccccaacgccaaccccaacgccaaccccaacgccaaccccaacgccaaccccaacgccaaccccaacgccaaccccgccgccuacaucaagcccggcagcgccaacaagcccaaggacgagcuggacuacgccaacgacaucgagaagaagaucugcaagauggagaagugcagcgccgccuacgagcccagcgacaagcacaucaaggaguaccugaacaagauccagaacagccugugaggacuagucccuguucccagagcccacuuuuuuuucuuuuuuugaaauaaaauagccugucuuucagaucucaaaggcucuuuucagagccaccaaaaaaaaaaaaaaaaaaaaaaaaaaaaaaaaaaaaaaaaaaaaaaaaaaaaaaaaaaaaaaaaaaaaaaaaaaaaaaaaaaaaaaaaaaaaaaaaaaaaagaauu

SEQ ID NO: 9632 - RNA, 1403 nt, Artificial Sequence
  mRNA Design a-3 (hSL-A100-N5) comprising derived and/or modified sequence from Pf(3D7)__XP_001351122.1__HsALB_Pf-CSP(19-272)_L(AAY)_Pf-CSP(346-3 75)_L(AAY)_Pf-CSP(310-327)_L(AAY)_PADRE (opt4)
aggagagggcgcuuggcuugcaaggacccugagcugcggcauugaagcacacccaacccaacucgacugaagucagccucacugaaccggaucugagaaucuucucucucugggcuugccagggcucuccgaaccuagcuagcauccucuucaauuccaacuagaaagcuuaccaugaagugggugaccuucaucagccugcuguuccuguucagcagcgccuacagccuguuccaggaguaccagugcuacggcagcagcagcaacaccagagugcugaacgagcugaacuacgacaacgccggcaccaaccuguacaacgagcuggagaugaacuacuacggcaagcaggagaacugguacagccugaagaagaacagcagaagccugggcgagaacgacgacggcaacaacgaggacaacgagaagcugagaaagcccaagcacaagaagcugaagcagcccgccgacggcaaccccgaccccaacgccaaccccaacguggaccccaacgccaaccccaacguggaccccaacgccaaccccaacguggaccccaacgccaaccccaacgccaaccccaacgccaaccccaacgccaaccccaacgccaaccccaacgccaaccccaacgccaaccccaacgccaaccccaacgccaaccccaacgccaaccccaacgccaaccccaacgccaaccccaacgccaaccccaacgccaaccccaacgccaaccccaacgccaaccccaacgccaaccccaacguggaccccaacgccaaccccaacgccaaccccaacgccaaccccaacgccaaccccaacgccaaccccaacgccaaccccaacgccaaccccaacgccaaccccaacgccaaccccaacgccaaccccaacgccaaccccaacgccaaccccaacgccaaccccaacgccaaccccaacgccaaccccaacgccaaccccaacgccaaccccaacgccaaccccgccgccuacaucaagcccggcagcgccaacaagcccaaggacgagcuggacuacgccaacgacaucgagaagaagaucugcaagauggagaagugcagcgccgccuacgagcccagcgacaagcacaucaaggaguaccugaacaagauccagaacagccuggccgccuacgccaaguucguggccgccuggacccugaaggccgccgccugaggacuagucccuguucccagagcccacuuuuuuuucuuuuuuugaaauaaaauagccugucuuucagaucucaaaggcucuuuucagagccaccaaaaaaaaaaaaaaaaaaaaaaaaaaaaaaaaaaaaaaaaaaaaaaaaaaaaaaaaaaaaaaaaaaaaaaaaaaaaaaaaaaaaaaaaaaaaaaaaaaaaagaauu

SEQ ID NO: 9633 - RNA, 1403 nt, Artificial Sequence
  mRNA Design a-3 (hSL-A100-N5) comprising derived and/or modified sequence from Pf(3D7)__XP_001351122.1__HsALB_Pf-CSP(19-272)_L(AAY)_Pf-CSP(310-3 27)_L(AAY)_Pf-CSP(346-375)_L(AAY)_PADRE (opt4)
aggagagggcgcuuggcuugcaaggacccugagcugcggcauugaagcacacccaacccaacucgacugaagucagccucacugaaccggaucugagaaucuucucucucugggcuugccagggcucuccgaaccuagcuagcauccucuucaauuccaacuagaaagcuuaccaugaagugggugaccuucaucagccugcuguuccuguucagcagcgccuacagccuguuccaggaguaccagugcuacggcagcagcagcaacaccagagugcugaacgagcugaacuacgacaacgccggcaccaaccuguacaacgagcuggagaugaacuacuacggcaagcaggagaacugguacagccugaagaagaacagcagaagccugggcgagaacgacgacggcaacaacgaggacaacgagaagcugagaaagcccaagcacaagaagcugaagcagcccgccgacggcaaccccgaccccaacgccaaccccaacguggaccccaacgccaaccccaacguggaccccaacgccaaccccaacguggaccccaacgccaaccccaacgccaaccccaacgccaaccccaacgccaaccccaacgccaaccccaacgccaaccccaacgccaaccccaacgccaaccccaacgccaaccccaacgccaaccccaacgccaaccccaacgccaaccccaacgccaaccccaacgccaaccccaacgccaaccccaacgccaaccccaacgccaaccccaacguggaccccaacgccaaccccaacgccaaccccaacgccaaccccaacgccaaccccaacgccaaccccaacgccaaccccaacgccaaccccaacgccaaccccaacgccaaccccaacgccaaccccaacgccaaccccaacgccaaccccaacgccaaccccaacgccaaccccaacgccaaccccaacgccaaccccaacgccaaccccaacgccaaccccgccgccuacgagcccagcgacaagcacaucaaggaguaccugaacaagauccagaacagccuggccgccuacaucaagcccggcagcgccaacaagcccaaggacgagcuggacuacgccaacgacaucgagaagaagaucugcaagauggagaagugcagcgccgccuacgccaaguucguggccgccuggacccugaaggccgccgccugaggacuagucccuguucccagagcccacuuuuuuuucuuuuuuugaaauaaaauagccugucuuucagaucucaaaggcucuuuucagagccaccaaaaaaaaaaaaaaaaaaaaaaaaaaaaaaaaaaaaaaaaaaaaaaaaaaaaaaaaaaaaaaaaaaaaaaaaaaaaaaaaaaaaaaaaaaaaaaaaaaaaagaauu

SEQ ID NO: 9634 - RNA, 1457 nt, Artificial Sequence
  mRNA Design a-3 (hSL-A100-N5) comprising derived and/or modified sequence from Pf(3D7)__XP_001351122.1__HsALB_Pf-CSP(19-272)_L(AAY)_Pf-CSP(310-3 27)_L(AAY)_Pf-CSP(346-375)_L(AAY)_PADRE_L(AAY)_P2 (opt4)
aggagagggcgcuuggcuugcaaggacccugagcugcggcauugaagcacacccaacccaacucgacugaagucagccucacugaaccggaucugagaaucuucucucucugggcuugccagggcucuccgaaccuagcuagcauccucuucaauuccaacuagaaagcuuaccaugaagugggugaccuucaucagccugcuguuccuguucagcagcgccuacagccuguuccaggaguaccagugcuacggcagcagcagcaacaccagagugcugaacgagcugaacuacgacaacgccggcaccaaccuguacaacgagcuggagaugaacuacuacggcaagcaggagaacugguacagccugaagaagaacagcagaagccugggcgagaacgacgacggcaacaacgaggacaacgagaagcugagaaagcccaagcacaagaagcugaagcagcccgccgacggcaaccccgaccccaacgccaaccccaacguggaccccaacgccaaccccaacguggaccccaacgccaaccccaacguggaccccaacgccaaccccaacgccaaccccaacgccaaccccaacgccaaccccaacgccaaccccaacgccaaccccaacgccaaccccaacgccaaccccaacgccaaccccaacgccaaccccaacgccaaccccaacgccaaccccaacgccaaccccaacgccaaccccaacgccaaccccaacgccaaccccaacgccaaccccaacguggaccccaacgccaaccccaacgccaaccccaacgccaaccccaacgccaaccccaacgccaaccccaacgccaaccccaacgccaaccccaacgccaaccccaacgccaaccccaacgccaaccccaacgccaaccccaacgccaaccccaacgccaaccccaacgccaaccccaacgccaaccccaacgccaaccccaacgccaaccccaacgccaaccccgccgccuacgagcccagcgacaagcacaucaaggaguaccugaacaagauccagaacagccuggccgccuacaucaagcccggcagcgccaacaagcccaaggacgagcuggacuacgccaacgacaucgagaagaagaucugcaagauggagaagugcagcgccgccuacgccaaguucguggccgccuggacccugaaggccgccgccgccgccuaccaguacaucaaggccaacagcaaguucaucggcaucaccgagcugugaggacuagucccuguucccagagcccacuuuuuuuucuuuuuuugaaauaaaauagccugucuuucagaucucaaaggcucuuuucagagccaccaaaaaaaaaaaaaaaaaaaaaaaaaaaaaaaaaaaaaaaaaaaaaaaaaaaaaaaaaaaaaaaaaaaaaaaaaaaaaaaaaaaaaaaaaaaaaaaaaaaaagaauu

SEQ ID NO: 9635 - RNA, 1421 nt, Artificial Sequence
  mRNA Design a-3 (hSL-A100-N5) comprising derived and/or modified sequence from Pf(3D7)__XP_001351122.1__HsALB_Pf-CSP(19-272)_L(AAY)_Pf-CSP(310-3 27)_Linker (AAY)_Pf-CSP(346-397) (opt4)
aggagagggcgcuuggcuugcaaggacccugagcugcggcauugaagcacacccaacccaacucgacugaagucagccucacugaaccggaucugagaaucuucucucucugggcuugccagggcucuccgaaccuagcuagcauccucuucaauuccaacuagaaagcuuaccaugaagugggugaccuucaucagccugcuguuccuguucagcagcgccuacagccuguuccaggaguaccagugcuacggcagcagcagcaacaccagagugcugaacgagcugaacuacgacaacgccggcaccaaccuguacaacgagcuggagaugaacuacuacggcaagcaggagaacugguacagccugaagaagaacagcagaagccugggcgagaacgacgacggcaacaacgaggacaacgagaagcugagaaagcccaagcacaagaagcugaagcagcccgccgacggcaaccccgaccccaacgccaaccccaacguggaccccaacgccaaccccaacguggaccccaacgccaaccccaacguggaccccaacgccaaccccaacgccaaccccaacgccaaccccaacgccaaccccaacgccaaccccaacgccaaccccaacgccaaccccaacgccaaccccaacgccaaccccaacgccaaccccaacgccaaccccaacgccaaccccaacgccaaccccaacgccaaccccaacgccaaccccaacgccaaccccaacgccaaccccaacguggaccccaacgccaaccccaacgccaaccccaacgccaaccccaacgccaaccccaacgccaaccccaacgccaaccccaacgccaaccccaacgccaaccccaacgccaaccccaacgccaaccccaacgccaaccccaacgccaaccccaacgccaaccccaacgccaaccccaacgccaaccccaacgccaaccccaacgccaaccccaacgccaaccccgccgccuacgagcccagcgacaagcacaucaaggaguaccugaacaagauccagaacagccuggccgccuacaucaagcccggcagcgccaacaagcccaaggacgagcuggacuacgccaacgacaucgagaagaagaucugcaagauggagaagugcagcagcguguucaacguggugaacagcagcaucggccugaucauggugcugagcuuccuguuccugaacugaggacuagucccuguucccagagcccacuuuuuuuucuuuuuuugaaauaaaauagccugucuuucagaucucaaaggcucuuuucagagccaccaaaaaaaaaaaaaaaaaaaaaaaaaaaaaaaaaaaaaaaaaaaaaaaaaaaaaaaaaaaaaaaaaaaaaaaaaaaaaaaaaaaaaaaaaaaaaaaaaaaaagaauu

SEQ ID NO: 9636 - RNA, 2021 nt, Artificial Sequence
  mRNA Design a-3 (hSL-A100-N5) comprising derived and/or modified sequence from Pf(3D7)__XP_001351122.1__LumSynt_L(GGS4-GGG)_Pf-CSP(19-397) (opt5)
aggagagggcgcuuggcuugcaaggacccugagcugcggcauugaagcacacccaacccaacucgacugaagucagccucacugaaccggaucugagaaucuucucucucugggcuugccagggcucuccgaaccuagcuagcauccucuucaauuccaacuagaaagcuuaccaugcagaucuacgagggcaagcugaccgccgaagggcucagauucggaauuguggcuagccgguuuaaccacgcccuggucgaccgccuuguugagggcgcgaucgaugcuauugugagacaugggggacgggaagaggacaucacacuggugcgcguccccggcuccugggaaauuccuguggccgccggggagcucgcuagaaaagaggauaucgacgccguuaucgcuauuggagugcugauccggggcgccacgccgcacuucgauuauauugcgucugaagucagcaagggccuugccgaccugucccucgagcugcgcaaacccaucaccuuuggggugauuacagcugauacccuggaacaagccaucgagagagcuggaacaaagcauggcaauaaagggugggaggccgcgcucucugccauugaaauggcuaaccuguucaagagccuucggggaggcuccgggggaucuggcggcagcgggggauccggcgggggacuguuucaggaguaccagugcuauggcuccucuuccaauacccgcguucucaacgaacugaauuacgacaacgccgggacaaaucuuuauaacgagcuggaaaugaauuacuauggaaagcaggagaacugguacagccucaaaaagaacucuagaucccugggcgagaaugaugacggcaauaacgaagauaaugagaaacugcggaagccuaaacacaagaagcucaaacaacccgcugacgggaacccugaucccaacgccaauccuaacguggacccgaaugccaaccccaaugucgacccuaacgcuaaucccaacguggauccuaaugcgaaccccaaugccaacccgaaugcuaacccuaaugccaaccccaacgccaauccuaacgcuaaucccaacgccaaucccaacgcgaauccuaacgcuaauccgaacgccaaucccaacgccaauccuaacgcuaaucccaacgccaacccuaaugcuaaccccaaugccaacccgaaugcgaacccuaaugccaaccccaauguggacccuaacgcuaaucccaacgccaauccuaacgcuaaucccaacgccaacccgaaugcgaacccuaaugccaaccccaaugcuaaccccaaugccaacccuaaugcuaacccgaaugccaaccccaaugccaacccuaaugcuaaccccaaugcgaacccuaacgccaaucccaacgcuaauccuaacgccaaucccaacgccaauccgaacgcuaauccuaacaagaauaaccagggaaauggccaggggcauaacaugcccaaugauccuaaccgcaacgucgacgaaaaugccaacgcgaauagcgcuguuaaaaacaauaacaaugaggaacccucugauaagcacaucaaagaguaccugaacaagauccagaauagccuuagcaccgagugguccccguguucugugacgugcggaaacggcauucaagugagaaucaaaccugggagcgccaauaagcccaaggacgaacuggauuaugccaacgacauugagaaaaagaucuguaaaauggaaaagugcuccagcgucuucaaugugguuaacucuuccauuggccucaucauggugcugagcuuucuuuuccugaauugaggacuagucccuguucccagagcccacuuuuuuuucuuuuuuugaaauaaaauagccugucuuucagaucucaaaggcucuuuucagagccaccaaaaaaaaaaaaaaaaaaaaaaaaaaaaaaaaaaaaaaaaaaaaaaaaaaaaaaaaaaaaaaaaaaaaaaaaaaaaaaaaaaaaaaaaaaaaaaaaaaaaagaauu

SEQ ID NO: 9637 - RNA, 1883 nt, Artificial Sequence
  mRNA Design a-3 (hSL-A100-N5) comprising derived and/or modified sequence from Pf(3D7)__XP_001351122.1__HsALB_Pf-CSP(19-272)_L(PVTN)_HBsAg (opt5)
aggagagggcgcuuggcuugcaaggacccugagcugcggcauugaagcacacccaacccaacucgacugaagucagccucacugaaccggaucugagaaucuucucucucugggcuugccagggcucuccgaaccuagcuagcauccucuucaauuccaacuagaaagcuuaccaugaagugggugaccuucaucagccugcucuuucuguucuccucugccuacagccuuuuucaggaguaucaaugcuacggcuccucuagcaacacaagaguccugaaugaacucaacuaugacaaugcugggacgaaccuguacaaugagcuugaaaugaacuauuacggaaaacaggagaauugguauucccugaagaaaaacucucggagccucggcgaaaaugaugacgggaacaaugaggauaacgagaagcugcgcaaacccaagcacaagaaacugaagcagccugccgacggaaauccggaucccaacgcgaauccuaacguugaccccaacgcuaauccuaacguggaucccaaugccaacccuaauguggacccgaacgccaaucccaacgcuaauccuaacgccaaucccaacgcuaauccuaacgccaaucccaacgcgaacccgaaugccaacccuaaugcuaaccccaaugccaacccuaaugcuaaccccaaugccaaccccaaugcgaacccuaaugccaacccgaaugcuaaccccaacgccaauccuaacgcuaaucccaacgccaauccuaacgucgaucccaaugccaacccgaaugcuaacccuaaugcgaaccccaaugccaacccuaaugcuaaccccaacgccaauccuaacgccaaucccaacgcuaauccgaacgccaauccuaacgcgaaucccaacgcuaaucccaacgccaauccuaacgccaauccgaacgcuaaucccaacgccaacccuaaugcuaaccccaaugccaacccuaaugcgaaucccccugugaccaacauggaaaacauuacauccggcuuccucgggccccugcuuguucugcaggccggauuuuuccuccugaccagaauccuuacaauuccgcaaagccuggacucuugguggaccucccucaauuuucugggcggcagcccugugugucuggggcagaacucucagucccccacaagcaaucauucuccuaccuccugucccccgaucugcccuggauaccgguggaugugccuccgcagauucauuaucuuucuguucauccuucugcucugucugauuuuucuucugguccuccuggauuaccagggcaugcugcccgugugcccucucauccccgggagcacgaccacaaacaccggacccuguaaaacaugcaccacgccugcucaaggcaauuccauguucccgucuuguugcuguacaaagcccaccgacgggaacugcacaugcauuccuauccccagcuccugggccuuugcuaaauaucugugggagugggccagcguucgguucucuuggcuuucccugcucgugccuuucguccagugguuugugggacugagccccaccguguggcuuucugcgauuuggaugaugugguacuggggcccuagccuguauuccaucgucucuccguucauuccccuccugccuaucuuuuucugucuguggguuuacaucugaggacuagucccuguucccagagcccacuuuuuuuucuuuuuuugaaauaaaauagccugucuuucagaucucaaaggcucuuuucagagccaccaaaaaaaaaaaaaaaaaaaaaaaaaaaaaaaaaaaaaaaaaaaaaaaaaaaaaaaaaaaaaaaaaaaaaaaaaaaaaaaaaaaaaaaaaaaaaaaaaaaaagaauu

SEQ ID NO: 9638 - RNA, 2000 nt, Artificial Sequence
  mRNA Design a-3 (hSL-A100-N5) comprising derived and/or modified sequence from Pf(3D7)__XP_001351122.1__HsALB_Pf-CSP(19-272)_L(AAY)_Pf-CSP(346-3 65)_L(AAY)_PADRE_L(PVTN)_HBsAg (opt5)
aggagagggcgcuuggcuugcaaggacccugagcugcggcauugaagcacacccaacccaacucgacugaagucagccucacugaaccggaucugagaaucuucucucucugggcuugccagggcucuccgaaccuagcuagcauccucuucaauuccaacuagaaagcuuaccaugaagugggugaccuucaucagccugcucuuucuguucuccucugccuacagccuuuuucaggaguaucaaugcuacggcuccucuagcaacacaagaguccugaaugaacucaacuaugacaaugcugggacgaaccuguacaaugagcuugaaaugaacuauuacggaaaacaggagaauugguauucccugaagaaaaacucucggagccucggcgaaaaugaugacgggaacaaugaggauaacgagaagcugcgcaaacccaagcacaagaaacugaagcagccugccgacggaaauccggaucccaacgcgaauccuaacguugaccccaacgcuaauccuaacguggaucccaaugccaacccuaauguggacccgaacgccaaucccaacgcuaauccuaacgccaaucccaacgcuaauccuaacgccaaucccaacgcgaacccgaaugccaacccuaaugcuaaccccaaugccaacccuaaugcuaaccccaaugccaaccccaaugcgaacccuaaugccaacccgaaugcuaaccccaacgccaauccuaacgcuaaucccaacgccaauccuaacgucgaucccaaugccaacccgaaugcuaacccuaaugcgaaccccaaugccaacccuaaugcuaaccccaacgccaauccuaacgccaaucccaacgcuaauccgaacgccaauccuaacgcgaaucccaacgcuaaucccaacgccaauccuaacgccaauccgaacgcuaaucccaacgccaacccuaaugcuaaccccaaugccaacccuaaugcgaaccccgccgcuuacauuaaaccuggcuccgccaauaagcccaaagacgaacucgauuacgcuaacgacaucgaggccgcguaugccaaguucguggcugccuggacccugaaggcugccgccccgguuacaaauauggaaaacauuaccagcggguuucuuggaccucugcucgugcugcaggcuggcuucuuucuucugacaagaauccucaccauuccccaaucucuggauuccugguggacaagccugaauuuccucggcgggucuccugucugucugggacagaacucccagagccccaccucuaaucauuccccgacgagcugcccucccaucuguccuggcuaccgguggaugugccuucgcagauuuaucauuuuccuguuuauccuccugcuuugucugauuuuccuccuggugcugcucgacuaucaggggaugcugcccguuugcccccuuaucccuggauccaccacaaccaacacaggcccguguaaaaccugcacgacacccgcgcaaggaaauucuauguuuccuagcuguugcuguaccaagcccacagacgggaacuguaccugcauuccuauccccuccagcugggccuucgcuaaauaccugugggagugggccucugugcgguucuccuggcucagccugcuugucccuuuugugcagugguucgugggccugucuccgaccgucuggcucagcgccauuuggaugaugugguauuggggccccucccuguacucuaucguuagcccuuuuaucccccugcucccuauuuucuuuugccuguggguguauaucugaggacuagucccuguucccagagcccacuuuuuuuucuuuuuuugaaauaaaauagccugucuuucagaucucaaaggcucuuuucagagccaccaaaaaaaaaaaaaaaaaaaaaaaaaaaaaaaaaaaaaaaaaaaaaaaaaaaaaaaaaaaaaaaaaaaaaaaaaaaaaaaaaaaaaaaaaaaaaaaaaaaaagaauu

SEQ ID NO: 9639 - RNA, 2219 nt, Artificial Sequence
  mRNA Design a-3 (hSL-A100-N5) comprising derived and/or modified sequence from Pf(3D7)__XP_001351122.1__HsALB_Pf-CSP(19-384)_L(PVTN)_HBsAg (opt5)
aggagagggcgcuuggcuugcaaggacccugagcugcggcauugaagcacacccaacccaacucgacugaagucagccucacugaaccggaucugagaaucuucucucucugggcuugccagggcucuccgaaccuagcuagcauccucuucaauuccaacuagaaagcuuaccaugaagugggugaccuucaucagccugcucuuucuguucuccucugccuacagccuuuuucaggaguaucaaugcuacggcuccucuagcaacacaagaguccugaaugaacucaacuaugacaaugcugggacgaaccuguacaaugagcuugaaaugaacuauuacggaaaacaggagaauugguauucccugaagaaaaacucucggagccucggcgaaaaugaugacgggaacaaugaggauaacgagaagcugcgcaaacccaagcacaagaaacugaagcagccugccgacggaaauccggaucccaacgcgaauccuaacguugaccccaacgcuaauccuaacguggaucccaaugccaacccuaauguggacccgaacgccaaucccaacgcuaauccuaacgccaaucccaacgcuaauccuaacgccaaucccaacgcgaacccgaaugccaacccuaaugcuaaccccaaugccaacccuaaugcuaaccccaaugccaaccccaaugcgaacccuaaugccaacccgaaugcuaaccccaacgccaauccuaacgcuaaucccaacgccaauccuaacgucgaucccaaugccaacccgaaugcuaacccuaaugcgaaccccaaugccaacccuaaugcuaaccccaacgccaauccuaacgccaaucccaacgcuaauccgaacgccaauccuaacgcgaaucccaacgcuaaucccaacgccaauccuaacgccaauccgaacgcuaaucccaacgccaacccuaaugcuaaccccaaugccaacccuaaugcgaaccccaauaaaaacaaucagggcaacgggcaaggacauaauaugccuaacgaccccaauagaaacguggaugaaaaugccaacgcuaacuccgccguuaagaauaacaauaacgaggaaccgagcgacaaacacauuaaggaguaccucaauaagauccagaacucucuguccaccgaguggagcccuuguucugugacaugcggcaauggcauucagguccggaucaaacccggguccgcuaacaagccuaaagaugaacuugacuacgccaaugacauugagaagaaaaucuguaagauggaaaaaugcagcucuguguucaacguugucaauuccagccccgugaccaacauggagaauaucacauccggauuucugggcccgcuccuggugcuucaggcgggguucuuucugcucacccgcauucugacaaucccucaaucucuggauagcugguggaccucccucaacuuccugggaggcagccccgugugucuugggcaaaauucucaguccccuacgagcaaccauucucccaccagcugucccccuauuugcccgggauauagauggaugugccugcggcgcuuuaucauuuuccucuuuauccugcuucugugucucauuuuccugcugguccuccuggacuaccagggcaugcuucccguuugcccucugauccccggcuccacaaccacaaacaccgggccuuguaagacgugcacaacccccgcccagggaaauucuauguuuccuagcugcuguugcacaaagccgaccgauggcaacuguaccugcauccccauuccuuccagcugggcuuucgccaaauaucucugggaaugggcuucugugagauucuccuggcugagccuucuggugcccuuuguccagugguucguggggcucucuccuacaguuuggcuguccgccaucuggaugaugugguacuggggacccagccuguauuccauugugucuccguuuaucccucuccugcccauuuucuuuugucuuugggucuacaucugaggacuagucccuguucccagagcccacuuuuuuuucuuuuuuugaaauaaaauagccugucuuucagaucucaaaggcucuuuucagagccaccaaaaaaaaaaaaaaaaaaaaaaaaaaaaaaaaaaaaaaaaaaaaaaaaaaaaaaaaaaaaaaaaaaaaaaaaaaaaaaaaaaaaaaaaaaaaaaaaaaaaagaauu

SEQ ID NO: 9640 - RNA, 2036 nt, Artificial Sequence
  mRNA Design a-3 (hSL-A100-N5) comprising derived and/or modified sequence from Pf(3D7)__XP_001351122.1__HsALB_Pf-CSP(19-384)_L(SGG)_Ferritin (opt5)
aggagagggcgcuuggcuugcaaggacccugagcugcggcauugaagcacacccaacccaacucgacugaagucagccucacugaaccggaucugagaaucuucucucucugggcuugccagggcucuccgaaccuagcuagcauccucuucaauuccaacuagaaagcuuaccaugaagugggugaccuucaucagccugcucuuucuguucuccucugccuacagccuuuuucaggaguaucaaugcuacggcuccucuagcaacacaagagugcugaaugaacucaacuaugacaaugcugggacgaaccuguacaaugagcuugaaaugaacuauuacggaaaacaggagaauugguauucccugaagaaaaacucucggagccucggcgaaaaugaugacgggaacaaugaggauaacgagaagcugcgcaaacccaagcacaagaaacugaagcagccugccgacggaaauccggaucccaacgcgaauccuaacguugaccccaacgcuaauccuaacguggaucccaaugccaacccuaauguggacccgaacgccaaucccaacgcuaauccuaacgccaaucccaacgcuaauccuaacgccaaucccaacgcgaacccgaaugccaacccuaaugcuaaccccaaugccaacccuaaugcuaaccccaaugccaaccccaaugcgaacccuaaugccaacccgaaugcuaaccccaacgccaauccuaacgcuaaucccaacgccaauccuaacgucgaucccaaugccaacccgaaugcuaacccuaaugcgaaccccaaugccaacccuaaugcuaaccccaacgccaauccuaacgccaaucccaacgcuaauccgaacgccaauccuaacgcgaaucccaacgcuaaucccaacgccaauccuaacgccaauccgaacgcuaaucccaacgccaacccuaaugcuaaccccaaugccaacccuaaugcgaaccccaauaaaaacaaucagggcaacgggcaaggacauaauaugccuaacgaccccaauagaaacguggaugaaaaugccaacgcuaacuccgccguuaagaauaacaauaacgaggaaccgagcgacaaacacauuaaggaguaccucaauaagauccagaacucucuguccaccgaguggagcccuuguucugugacaugcggcaauggcauucagguccggaucaaacccggguccgcuaacaagccuaaagaugaacuugacuacgccaaugacauugagaagaaaaucuguaagauggaaaaaugcagcucuguguucaacguugugaacuccagcuccggaggccugucuaaggauaucauuaagcuccugaaugagcaggucaauaaagaaaugaacagcuccaaucuuuauaugagcaugucuuccugguguuacacccauagccuggacggggcgggacucuuucuguucgaucacgccgcugaggaguaugaacaugccaagaaacugaucauuuuucucaacgagaacaaugugcccgugcaacugacaucuaucagcgcuccggaacacaaguucgagggccuuacccagauuuuucagaaagccuacgaacacgagcagcauaucuccgagucuauuaacaauaucgucgaccacgccaucaagagcaaggaucaugcuacauucaacuuucugcaaugguauguugcggaacagcacgaggaagagguccucuucaaagacauucuggauaagaucgaacuuauugggaaugagaaccacggacuguaccucgccgaccaguaugugaaaggcaucgcuaagucccgcaaaagcugaggacuagucccuguucccagagcccacuuuuuuuucuuuuuuugaaauaaaauagccugucuuucagaucucaaaggcucuuuucagagccaccaaaaaaaaaaaaaaaaaaaaaaaaaaaaaaaaaaaaaaaaaaaaaaaaaaaaaaaaaaaaaaaaaaaaaaaaaaaaaaaaaaaaaaaaaaaaaaaaaaaaagaauu

SEQ ID NO: 9641 - RNA, 1997 nt, Artificial Sequence
  mRNA Design a-3 (hSL-A100-N5) comprising derived and/or modified sequence from Pf(3D7)__XP_001351122.1__HsALB_Pf-CSP(93-384)_L(PVTN)_HBsAg (opt5)
aggagagggcgcuuggcuugcaaggacccugagcugcggcauugaagcacacccaacccaacucgacugaagucagccucacugaaccggaucugagaaucuucucucucugggcuugccagggcucuccgaaccuagcuagcauccucuucaauuccaacuagaaagcuuaccaugaagugggugaccuucaucagccugcucuuucuguucuccucugccuacagcaaacuuaagcagcccgcugacggcaacccugauccgaaugccaaccccaaugucgacccuaacgcgaaucccaacguugauccuaaugcuaaccccaauguggacccuaacgccaauccgaacgccaaucccaacgcuaauccuaacgccaaccccaaugcuaacccuaaugccaaccccaaugcgaacccgaaugccaacccuaaugcuaaccccaaugccaacccuaaugcuaaccccaaugccaaccccaacgcgaauccuaacgccaauccgaacgcuaaucccaacgccaauccuaacgcuaaucccaacguggauccuaaugccaaccccaaugccaacccgaaugcuaacccuaacgcgaaucccaacgccaauccuaacgcuaaucccaacgccaauccuaacgccaaucccaacgcuaauccgaacgccaauccuaacgcgaaucccaacgcuaaccccaaugccaacccuaaugccaacccgaaugcuaaccccaaugccaacccuaaugcuaaccccaaugccaacccuaauaaaaacaaucaagggaacggacagggccacaauaugcccaacgacccuaacagaaaugucgaugagaacgcgaaugccaacuccgcugugaagaauaacaauaacgaggaacccucugacaaacauauuaaggaauaucugaauaagauccagaacagccucuccacagaguggucuccgugcagcguuacgugugggaaugggauucaggugcggaucaaaccuggcuccgccaacaagcccaaagaugaacuggacuacgcuaaugauauugagaagaaaaucugcaagauggagaaguguagcucugucuuuaacgugguuaauuccagcccugugaccaacauggaaaacaucacaucuggguuccuuggaccccugcucguccugcaagccggcuuuuuccugcucacccgcauucugacaaucccgcagucccuugacagcugguggaccucucugaauuuucucggcggguccccugugugccugggacagaacagccagucccccacaucuaaucacagcccuaccuccuguccucccauuugccccggcuauagauggaugugucuucggcgcuucaucauuuuucuguucauccuccugcugugccucauuuuucugcuugugcugcucgauuaccaagggaugcugccggucuguccccuuaucccuggaagcacgaccacaaacaccggccccugcaaaacauguaccacgccugcgcagggaaauucuauguuccccuccugcugcuguacaaagccuaccgacggaaacugcacauguaucccgauucccagcucuugggccuuugcuaaauaucugugggagugggccagcguuagauucuccuggcucucucugcuggugccuuucgugcagugguuugucggccucagccccaccguguggcuguccgcuaucuggaugaugugguacuggggcccuagccuuuauucuauuguuucccccuucaucccgcugcucccuaucuuuuucugccuguggguguacauuugaggacuagucccuguucccagagcccacuuuuuuuucuuuuuuugaaauaaaauagccugucuuucagaucucaaaggcucuuuucagagccaccaaaaaaaaaaaaaaaaaaaaaaaaaaaaaaaaaaaaaaaaaaaaaaaaaaaaaaaaaaaaaaaaaaaaaaaaaaaaaaaaaaaaaaaaaaaaaaaaaaaaagaauu

SEQ ID NO: 9642 - RNA, 1658 nt, Artificial Sequence; identical to SEQ ID NO: 7709
  mRNA Design a-3 (hSL-A100-N5) comprising derived and/or modified sequence from Pf(3D7)__XP_001351122.1__HsALB_Pf-CSP(199-377)_L(PVTN)_HBsAg (opt5)

SEQ ID NO: 9643 - RNA, 1355 nt, Artificial Sequence
  mRNA Design a-3 (hSL-A100-N5) comprising derived and/or modified sequence from Pf(3D7)__XP_001351122.1__HsALB_Pf-CSP(19-272)_L(AAY)_Pf-CSP(346-3 75)_L(AAY)_Pf-CSP(310-327) (opt5)
aggagagggcgcuuggcuugcaaggacccugagcugcggcauugaagcacacccaacccaacucgacugaagucagccucacugaaccggaucugagaaucuucucucucugggcuugccagggcucuccgaaccuagcuagcauccucuucaauuccaacuagaaagcuuaccaugaagugggugaccuucaucagccugcucuuucuguucuccucugccuacagccuuuuucaggaguaucaaugcuacggcuccucuagcaacacaagaguccugaaugaacucaacuaugacaaugcugggacgaaccuguacaaugagcuugaaaugaacuauuacggaaaacaggagaauugguauucccugaagaaaaacucucggagccucggcgaaaaugaugacgggaacaaugaggauaacgagaagcugcgcaaacccaagcacaagaaacugaagcagccugccgacggaaauccggaucccaacgcgaauccuaacguugaccccaacgcuaauccuaacguggaucccaaugccaacccuaauguggacccgaacgccaaucccaacgcuaauccuaacgccaaucccaacgcuaauccuaacgccaaucccaacgcgaacccgaaugccaacccuaaugcuaaccccaaugccaacccuaaugcuaaccccaaugccaaccccaaugcgaacccuaaugccaacccgaaugcuaaccccaacgccaauccuaacgcuaaucccaacgccaauccuaacgucgaucccaaugccaacccgaaugcuaacccuaaugcgaaccccaaugccaacccuaaugcuaaccccaacgccaauccuaacgccaaucccaacgcuaauccgaacgccaauccuaacgcgaaucccaacgcuaaucccaacgccaauccuaacgccaauccgaacgcuaaucccaacgccaacccuaaugcuaaccccaaugccaacccuaaugcgaaccccgccgcuuacauuaaaccuggcuccgccaauaagcccaaagacgaacucgauuacgcuaacgacaucgagaagaagauuuguaaaauggaaaagugcagcgccgcguaugagccgucugauaaacauaucaaggaguaccugaauaaaauucagaacucccuuugaggacuagucccuguucccagagcccacuuuuuuuucuuuuuuugaaauaaaauagccugucuuucagaucucaaaggcucuuuucagagccaccaaaaaaaaaaaaaaaaaaaaaaaaaaaaaaaaaaaaaaaaaaaaaaaaaaaaaaaaaaaaaaaaaaaaaaaaaaaaaaaaaaaaaaaaaaaaaaaaaaaaagaauu

SEQ ID NO: 9644 - RNA, 1403 nt, Artificial Sequence
  mRNA Design a-3 (hSL-A100-N5) comprising derived and/or modified sequence from Pf(3D7)__XP_001351122.1__HsALB_Pf-CSP(19-272)_L(AAY)_Pf-CSP(346-3 75)_L(AAY)_Pf-CSP(310-327)_L(AAY)_PADRE (opt5)
aggagagggcgcuuggcuugcaaggacccugagcugcggcauugaagcacacccaacccaacucgacugaagucagccucacugaaccggaucugagaaucuucucucucugggcuugccagggcucuccgaaccuagcuagcauccucuucaauuccaacuagaaagcuuaccaugaagugggugaccuucaucagccugcucuuucuguucuccucugccuacagccuuuuucaggaguaucaaugcuacggcuccucuagcaacacaagaguccugaaugaacucaacuaugacaaugcugggacgaaccuguacaaugagcuugaaaugaacuauuacggaaaacaggagaauugguauucccugaagaaaaacucucggagccucggcgaaaaugaugacgggaacaaugaggauaacgagaagcugcgcaaacccaagcacaagaaacugaagcagccugccgacggaaauccggaucccaacgcgaauccuaacguugaccccaacgcuaauccuaacguggaucccaaugccaacccuaauguggacccgaacgccaaucccaacgcuaauccuaacgccaaucccaacgcuaauccuaacgccaaucccaacgcgaacccgaaugccaacccuaaugcuaaccccaaugccaacccuaaugcuaaccccaaugccaaccccaaugcgaacccuaaugccaacccgaaugcuaaccccaacgccaauccuaacgcuaaucccaacgccaauccuaacgucgaucccaaugccaacccgaaugcuaacccuaaugcgaaccccaaugccaacccuaaugcuaaccccaacgccaauccuaacgccaaucccaacgcuaauccgaacgccaauccuaacgcgaaucccaacgcuaaucccaacgccaauccuaacgccaauccgaacgcuaaucccaacgccaacccuaaugcuaaccccaaugccaacccuaaugcgaaccccgccgcuuacauuaaaccuggcuccgccaauaagcccaaagacgaacucgauuacgcuaacgacaucgagaagaagauuuguaaaauggaaaagugcagcgccgcguaugagccgucugauaaacauaucaaggaguaccugaauaaaauucagaacucccuugccgcuuaugccaaguucguggcugccuggacccugaaagccgcugcgugaggacuagucccuguucccagagcccacuuuuuuuucuuuuuuugaaauaaaauagccugucuuucagaucucaaaggcucuuuucagagccaccaaaaaaaaaaaaaaaaaaaaaaaaaaaaaaaaaaaaaaaaaaaaaaaaaaaaaaaaaaaaaaaaaaaaaaaaaaaaaaaaaaaaaaaaaaaaaaaaaaaaagaauu

SEQ ID NO: 9645 - RNA, 1403 nt, Artificial Sequence
  mRNA Design a-3 (hSL-A100-N5) comprising derived and/or modified sequence from Pf(3D7)__XP_001351122.1__HsALB_Pf-CSP(19-272)_L(AAY)_Pf-CSP(310-3 27)_L(AAY)_Pf-CSP(346-375)_L(AAY)_PADRE (opt5)
aggagagggcgcuuggcuugcaaggacccugagcugcggcauugaagcacacccaacccaacucgacugaagucagccucacugaaccggaucugagaaucuucucucucugggcuugccagggcucuccgaaccuagcuagcauccucuucaauuccaacuagaaagcuuaccaugaagugggugaccuucaucagccugcucuuucuguucuccucugccuacagccuuuuucaggaguaucaaugcuacggcuccucuagcaacacaagaguccugaaugaacucaacuaugacaaugcugggacgaaccuguacaaugagcuugaaaugaacuauuacggaaaacaggagaauugguauucccugaagaaaaacucucggagccucggcgaaaaugaugacgggaacaaugaggauaacgagaagcugcgcaaacccaagcacaagaaacugaagcagccugccgacggaaauccggaucccaacgcgaauccuaacguugaccccaacgcuaauccuaacguggaucccaaugccaacccuaauguggacccgaacgccaaucccaacgcuaauccuaacgccaaucccaacgcuaauccuaacgccaaucccaacgcgaacccgaaugccaacccuaaugcuaaccccaaugccaacccuaaugcuaaccccaaugccaaccccaaugcgaacccuaaugccaacccgaaugcuaaccccaacgccaauccuaacgcuaaucccaacgccaauccuaacgucgaucccaaugccaacccgaaugcuaacccuaaugcgaaccccaaugccaacccuaaugcuaaccccaacgccaauccuaacgccaaucccaacgcuaauccgaacgccaauccuaacgcgaaucccaacgcuaaucccaacgccaauccuaacgccaauccgaacgcuaaucccaacgccaacccuaaugcuaaccccaaugccaacccuaaugcgaaccccgccgcuuacgaaccuuccgacaaacauauuaaggaguaccucaauaaaauccagaacagccuggccgcuuauauuaagcccggcucugccaauaagccgaaagaugaacuugacuacgcgaacgauaucgagaagaaaauuuguaagauggagaaaugcuccgccgcuuaugccaaguucguggcugccuggacccugaaagccgcugcgugaggacuagucccuguucccagagcccacuuuuuuuucuuuuuuugaaauaaaauagccugucuuucagaucucaaaggcucuuuucagagccaccaaaaaaaaaaaaaaaaaaaaaaaaaaaaaaaaaaaaaaaaaaaaaaaaaaaaaaaaaaaaaaaaaaaaaaaaaaaaaaaaaaaaaaaaaaaaaaaaaaaaagaauu

SEQ ID NO: 9646 - RNA, 1457 nt, Artificial Sequence
  mRNA Design a-3 (hSL-A100-N5) comprising derived and/or modified sequence from Pf(3D7)__XP_001351122.1__HsALB_Pf-CSP(19-272)_L(AAY)_Pf-CSP(310-3 27)_L(AAY)_Pf-CSP(346-375)_L(AAY)_PADRE_L(AAY)_P2 (opt5)
aggagagggcgcuuggcuugcaaggacccugagcugcggcauugaagcacacccaacccaacucgacugaagucagccucacugaaccggaucugagaaucuucucucucugggcuugccagggcucuccgaaccuagcuagcauccucuucaauuccaacuagaaagcuuaccaugaagugggugaccuucaucagccugcucuuucuguucuccucugccuacagccuuuuucaggaguaucaaugcuacggcuccucuagcaacacaagaguccugaaugaacucaacuaugacaaugcugggacgaaccuguacaaugagcuugaaaugaacuauuacggaaaacaggagaauugguauucccugaagaaaaacucucggagccucggcgaaaaugaugacgggaacaaugaggauaacgagaagcugcgcaaacccaagcacaagaaacugaagcagccugccgacggaaauccggaucccaacgcgaauccuaacguugaccccaacgcuaauccuaacguggaucccaaugccaacccuaauguggacccgaacgccaaucccaacgcuaauccuaacgccaaucccaacgcuaauccuaacgccaaucccaacgcgaacccgaaugccaacccuaaugcuaaccccaaugccaacccuaaugcuaaccccaaugccaaccccaaugcgaacccuaaugccaacccgaaugcuaaccccaacgccaauccuaacgcuaaucccaacgccaauccuaacgucgaucccaaugccaacccgaaugcuaacccuaaugcgaaccccaaugccaacccuaaugcuaaccccaacgccaauccuaacgccaaucccaacgcuaauccgaacgccaauccuaacgcgaaucccaacgcuaaucccaacgccaauccuaacgccaauccgaacgcuaaucccaacgccaacccuaaugcuaaccccaaugccaacccuaaugcgaaccccgccgcuuacgaaccuuccgacaaacauauuaaggaguaccucaauaaaauccagaacagccuggccgcuuauauuaagcccggcucugccaauaagccgaaagaugaacuugacuacgcgaacgauaucgagaagaaaauuuguaagauggagaaaugcuccgccgcuuaugccaaguucguggcugccuggacccugaaagccgcugcggccgcuuaccaauauaucaaggccaauagcaaguuuaucgggauuacagaacucugaggacuagucccuguucccagagcccacuuuuuuuucuuuuuuugaaauaaaauagccugucuuucagaucucaaaggcucuuuucagagccaccaaaaaaaaaaaaaaaaaaaaaaaaaaaaaaaaaaaaaaaaaaaaaaaaaaaaaaaaaaaaaaaaaaaaaaaaaaaaaaaaaaaaaaaaaaaaaaaaaaaaagaauu

SEQ ID NO: 9647 - RNA, 1421 nt, Artificial Sequence
  mRNA Design a-3 (hSL-A100-N5) comprising derived and/or modified sequence from Pf(3D7)__XP_001351122.1__HsALB_Pf-CSP(19-272)_L(AAY)_Pf-CSP(310-3 27)_Linker (AAY)_Pf-CSP(346-397) (opt5)
aggagagggcgcuuggcuugcaaggacccugagcugcggcauugaagcacacccaacccaacucgacugaagucagccucacugaaccggaucugagaaucuucucucucugggcuugccagggcucuccgaaccuagcuagcauccucuucaauuccaacuagaaagcuuaccaugaagugggugaccuucaucagccugcucuuucuguucuccucugccuacagccuuuuucaggaguaucaaugcuacggcuccucuagcaacacaagaguccugaaugaacucaacuaugacaaugcugggacgaaccuguacaaugagcuugaaaugaacuauuacggaaaacaggagaauugguauucccugaagaaaaacucucggagccucggcgaaaaugaugacgggaacaaugaggauaacgagaagcugcgcaaacccaagcacaagaaacugaagcagccugccgacggaaauccggaucccaacgcgaauccuaacguugaccccaacgcuaauccuaacguggaucccaaugccaacccuaauguggacccgaacgccaaucccaacgcuaauccuaacgccaaucccaacgcuaauccuaacgccaaucccaacgcgaacccgaaugccaacccuaaugcuaaccccaaugccaacccuaaugcuaaccccaaugccaaccccaaugcgaacccuaaugccaacccgaaugcuaaccccaacgccaauccuaacgcuaaucccaacgccaauccuaacgucgaucccaaugccaacccgaaugcuaacccuaaugcgaaccccaaugccaacccuaaugcuaaccccaacgccaauccuaacgccaaucccaacgcuaauccgaacgccaauccuaacgcgaaucccaacgcuaaucccaacgccaauccuaacgccaauccgaacgcuaaucccaacgccaacccuaaugcuaaccccaaugccaacccuaaugcgaaccccgccgcuuacgaaccuuccgacaaacauauuaaggaguaccucaauaaaauccagaacagccuggccgcuuauauuaagcccggcucugccaauaagccgaaagaugaacuugacuacgcgaacgauaucgagaagaaaauuuguaagauggagaaaugcuccagcguguucaauguugugaacucuuccaucgggcugaucaugguccucagcuuucuguuccuuaauugaggacuagucccuguucccagagcccacuuuuuuuucuuuuuuugaaauaaaauagccugucuuucagaucucaaaggcucuuuucagagccaccaaaaaaaaaaaaaaaaaaaaaaaaaaaaaaaaaaaaaaaaaaaaaaaaaaaaaaaaaaaaaaaaaaaaaaaaaaaaaaaaaaaaaaaaaaaaaaaaaaaaagaauu

SEQ ID NO: 9648 - RNA, 2021 nt, Artificial Sequence
  mRNA Design a-3 (hSL-A100-N5) comprising derived and/or modified sequence from Pf(3D7)__XP_001351122.1__LumSynt_L(GGS4-GGG)_Pf-CSP(19-397) (opt6)
aggagagggcgcuuggcuugcaaggacccugagcugcggcauugaagcacacccaacccaacucgacugaagucagccucacugaaccggaucugagaaucuucucucucugggcuugccagggcucuccgaaccuagcuagcauccucuucaauuccaacuagaaagcuuaccaugcaaauauacgaaggaaaacuaacagcagaaggauuacgauucggcauaguagcaucaagguucaaccacgcauuaguagauagacuaguagaaggagcaauagacgcaauaguccgacauggaggacgagaagaagauauaacacuagucagaguaccagggagcugggaaaucccaguagcagcaggagaacucgcaagaaaagaagauaucgacgccguaaucgcaaucgggguacuaauaagaggcgcaacaccccauuucgacuacauagcaagcgaaguaucaaaaggauuagcagaccuaaguuuagaacuaagaaaaccuauuacauucggcgucauaacggcagacacauuagaacaagccaucgaaagagcaggaacaaaacacggaaacaaaggcugggaagcagcacuaagcgcaauugaaauggcaaauuuauucaaaucccuaagaggcggcucagguggcaguggaggaucaggaggaucaggaggaggccuauuccaagaauaucaaugcuacggaucgagcucgaauacacgcguauuaaacgaauuaaacuacgacaacgcaggaacaaaccuauacaacgaacuagaaaugaacuauuauggaaaacaagagaacugguacucccuaaaaaaaaacagucgaagcuuaggagaaaaugacgacggaaauaacgaagacaacgaaaaacuaagaaaacccaaacauaaaaaauuaaaacaacccgcugacggaaacccagacccaaacgcuaacccgaacguugauccaaaugcaaacccaaauguggauccaaaugcaaaccccaacguagauccaaaugcaaacccaaacgcaaaccccaaugccaacccaaacgccaacccuaaugcuaauccaaacgcaaacccaaacgcaaacccgaacgcaaauccaaacgcaaacccuaaugcuaacccaaaugcaaauccaaacgcaaacccaaacgcuaacccaaacgcaaacccaaaugcaaacccaaaugcaaacccaaacgcaaauccaaacguagacccaaacgcaaauccaaacgcaaauccaaacgcaaacccaaacgccaaccccaaugcaaauccgaacgcaaacccaaacgcaaacccaaacgcaaacccaaacgcaaacccaaaugccaacccaaacgcaaacccgaacgcaaacccaaacgcaaacccaaacgcaaacccuaaugcgaacccaaaugccaacccaaacgcaaaccccaacgcuaacccaaacaaaaacaaucaaggaaacggacaagggcacaacaugccaaacgauccaaacagaaaugucgacgaaaacgccaaugcaaacagugccguaaaaaauaauaacaacgaagaaccuucagacaaacacauaaaagaauacuuaaacaaaauacaaaacucauuaucaaccgaauggagcccauguucuguuacaugcggaaauggaauacaaguaagaauaaaaccaggaucagcaaacaaaccaaaagacgaauuagacuacgcaaaugauauagaaaaaaaaauaugcaagauggaaaaaugcaguucuguauuuaacguaguaaacagcucaauaggucuaauaaugguacuauccuuucuuuuccugaacuaaggacuagucccuguucccagagcccacuuuuuuuucuuuuuuugaaauaaaauagccugucuuucagaucucaaaggcucuuuucagagccaccaaaaaaaaaaaaaaaaaaaaaaaaaaaaaaaaaaaaaaaaaaaaaaaaaaaaaaaaaaaaaaaaaaaaaaaaaaaaaaaaaaaaaaaaaaaaaaaaaaaaagaauu

SEQ ID NO: 9649 - RNA, 1883 nt, Artificial Sequence
  mRNA Design a-3 (hSL-A100-N5) comprising derived and/or modified sequence from Pf(3D7)__XP_001351122.1__HsALB_Pf-CSP(19-272)_L(PVTN)_HBsAg (opt6)
aggagagggcgcuuggcuugcaaggacccugagcugcggcauugaagcacacccaacccaacucgacugaagucagccucacugaaccggaucugagaaucuucucucucugggcuugccagggcucuccgaaccuagcuagcauccucuucaauuccaacuagaaagcuuaccaugaaauggguaaccuucaucucacuauuauucuuauuuucaucugcauacucacucuuccaagaauaccaaugcuacgguucaucuucuaacacaagaguacuaaacgaacuaaacuacgacaacgcaggaacaaaccucuauaacgaacuugaaaugaacuacuauggaaaacaagaaaacugguauucccuaaaaaaaaacucaagauccuuaggagaaaacgacgacggaaauaacgaagacaacgaaaaacuaagaaaaccaaaacacaaaaaacuaaaacaacccgcagacggaaacccagacccaaacgcaaacccaaacguagacccaaacgcaaacccaaacgucgacccaaacgccaauccaaacguagacccaaacgcuaacccaaacgccaauccaaacgcaaauccaaaugccaacccaaacgcaaacccaaaugcgaauccaaaugcaaaccccaaugcaaacccaaacgcaaauccaaacgcaaacccaaacgcaaacccuaacgcaaauccaaaugcaaacccuaacgcaaacccaaacgcaaauccaaacgcaaacccaaaugcaaauccaaacgucgacccaaacgcaaacccgaacgcaaacccaaacgcaaacccaaaugcaaauccaaaugcaaaccccaaugcaaacccaaacgcaaacccaaacgcuaacccaaaugcaaacccaaacgcaaacccaaacgcaaauccaaacgcaaacccaaacgcaaacccaaaugcaaacccaaacgcaaaccccaaugcaaauccaaacgcaaacccaaacgcaaacccacccguaaccaacauggaaaacaucacaucaggauuccuuggaccccucuuaguacuucaagcaggauucuuccuauuaacaagaauacuaacaauaccucaaucuuuagauucaugguggacuucauuaaauuuccuaggaggaagcccaguaugcuuaggacaaaacagccaaucaccaaccucaaaccacucaccaaccucaugcccaccaauaugcccaggauaccgauggaugugccuaagaagauucauaauauucuuauucauacuacuacuaugccucauauucuuacuaguacuauuagacuaccaaggaaugcugccagucugcccacuuauaccagguagcaccaccacuaacacaggaccuugcaaaacaugcacaacacccgcucaaggaaauucuauguuuccaucaugcugcugcacuaaacccacagauggcaauuguacaugcauaccaauccccucaucaugggcauuugccaaauacuuaugggaaugggcaucuguaagauucucuuggcuaucacucuuaguaccauucguacaaugguucguaggccuauccccuacaguauggcuauccgcaauauggaugaugugguacuggggaccaucacuauacucaauagucucacccuucauaccacuauuaccaauauucuucugccuauggguauauauauaaggacuagucccuguucccagagcccacuuuuuuuucuuuuuuugaaauaaaauagccugucuuucagaucucaaaggcucuuuucagagccaccaaaaaaaaaaaaaaaaaaaaaaaaaaaaaaaaaaaaaaaaaaaaaaaaaaaaaaaaaaaaaaaaaaaaaaaaaaaaaaaaaaaaaaaaaaaaaaaaaaaaagaauu

SEQ ID NO: 9650 - RNA, 2000 nt, Artificial Sequence
  mRNA Design a-3 (hSL-A100-N5) comprising derived and/or modified sequence from Pf(3D7)__XP_001351122.1__HsALB_Pf-CSP(19-272)_L(AAY)_Pf-CSP(346-3 65)_L(AAY)_PADRE_L(PVTN)_HBsAg (opt6)
aggagagggcgcuuggcuugcaaggacccugagcugcggcauugaagcacacccaacccaacucgacugaagucagccucacugaaccggaucugagaaucuucucucucugggcuugccagggcucuccgaaccuagcuagcauccucuucaauuccaacuagaaagcuuaccaugaaaugggucaccuucauuuccuuauuauucuuauuuucguccgcauacucacuauuucaagaauaucaauguuacggaucaagcucaaacacccgcguacucaacgaacuaaacuacgacaacgcaggaacaaaccuauauaacgaacuagaaaugaauuauuacggaaaacaagaaaacugguauucacuuaaaaaaaacuccagaucccuuggcgaaaacgacgacggaaauaaugaagacaacgaaaaacuuagaaaaccaaaacauaaaaaacuaaaacaaccugcagacgguaacccagauccaaaugcuaacccaaauguagacccuaacgcuaacccaaacguagauccaaacgccaacccaaacguagauccaaacgcaaacccaaacgcaaauccaaaugcaaacccaaacgccaaccccaacgcaaacccaaaugcaaauccuaaugcaaaucccaacgcaaauccaaacgcaaauccaaaugcaaaccccaacgcaaacccaaaugcaaauccaaaugcaaauccaaaugcaaacccaaacgcaaacccaaaugcaaauccuaacgcaaacccaaacgucgaccccaacgcaaauccaaacgcaaacccaaacgcaaaccccaaugcaaacccaaaugcaaacccaaacgcaaacccaaacgcaaaccccaacgcaaauccaaacgcaaauccaaaugcaaauccaaacgcaaaccccaaugcaaaccccaaugcuaacccaaacgccaaucccaacgcaaacccaaacgcaaaucccaacgcaaauccaaacgcaaacccugcagcauacauaaaacccggcucugcuaauaaacccaaagaugaacucgacuaugccaacgacauagaagcagccuacgcaaaauucguagcugcauggacauuaaaagcagcagcaccagugacaaacauggaaaacauuacaucaggauucuuagguccauuauuaguccuccaagcaggauucuucuuacuaacuagaauauuaacaauaccacaaucccuagacucuugguggacuucacuaaauuuccuaggaggauccccaguaugucucggucaaaauucucaaucaccuacaucaaaccauucaccaacaagcugccccccaaucugucccggauacagauggaugugccuacgcagauucauuauauuucuauucauacuacuucuaugccuaauauuccuacuaguccuucuagacuaccaaggaaugcuacccguaugcccacuuauaccaggauccacaacaacaaacacagguccaugcaaaacaugcacaacaccagcccaagguaauucuauguucccaucaugcuguugcacaaaaccaacagacgguaacugcacaugcaucccaauacccucaucaugggcauucgcaaaauaccuaugggaaugggcuucaguaagauucuccugguuaucccuuuuagucccauucguacaaugguucguaggauuaucacccacuguauggcuaucagcaauauggaugaugugguauuggggcccaucucuuuacucaaucgucuccccuuuuauuccacuacuacccauauuuuucugccuauggguauacauuuaaggacuagucccuguucccagagcccacuuuuuuuucuuuuuuugaaauaaaauagccugucuuucagaucucaaaggcucuuuucagagccaccaaaaaaaaaaaaaaaaaaaaaaaaaaaaaaaaaaaaaaaaaaaaaaaaaaaaaaaaaaaaaaaaaaaaaaaaaaaaaaaaaaaaaaaaaaaaaaaaaaaaagaauu

SEQ ID NO: 9651 - RNA, 2219 nt, Artificial Sequence
  mRNA Design a-3 (hSL-A100-N5) comprising derived and/or modified sequence from Pf(3D7)__XP_001351122.1__HsALB_Pf-CSP(19-384)_L(PVTN)_HBsAg (opt6)
aggagagggcgcuuggcuugcaaggacccugagcugcggcauugaagcacacccaacccaacucgacugaagucagccucacugaaccggaucugagaaucuucucucucugggcuugccagggcucuccgaaccuagcuagcauccucuucaauuccaacuagaaagcuuaccaugaaauggguaaccuucauaucucucuuauuccuuuuuucaucugcauauucacuauuucaagaauaucaauguuauggaucaucaucaaacacccgaguacucaacgaauuaaauuacgacaacgcagguacuaacuuauacaacgaauuagaaaugaauuacuauggaaaacaagaaaacugguauucccucaaaaaaaacucucgaucucuaggcgaaaacgacgacggcaacaacgaagacaacgaaaaacuacguaaacccaaacacaaaaaacuaaaacaaccagcagauggaaacccagacccaaacgcaaacccaaacguagacccaaacgcaaauccaaacguagacccgaacgcaaauccaaauguagaucccaaugcuaauccaaaugccaacccaaacgcaaacccuaacgcuaaucccaacgcaaacccaaacgcaaacccaaaugcaaacccaaacgcaaaccccaacgcaaacccaaaugcaaauccaaaugcaaauccaaacgccaacccaaaugccaacccaaacgcaaauccaaacgcuaaccccaacgcaaaccccaacgccaaucccaacguagaccccaacgcaaacccaaaugcaaauccaaacgcaaaccccaaugcaaacccaaacgcuaacccuaaugcaaacccaaacgccaacccaaaugcaaaccccaacgccaacccaaacgcaaauccaaacgcaaacccaaacgcuaacccaaacgccaacccaaacgcaaacccaaacgcuaacccaaacgcaaacccaaaugcaaacccaaaugcuaauccaaauaaaaacaaccaaggaaacggccaaggacauaauaugccuaacgacccaaacagaaacguagacgaaaaugcaaacgcaaacuccgcaguaaaaaauaacaauaacgaagaacccuccgacaaacauauaaaagaauaucuaaacaaaauacaaaauucacucucuacugaaugguccccaugcucaguaacauguggaaacggaauccaaguacgcauaaaaccaggaucagcaaacaaaccaaaagacgaacuagacuacgcaaacgauauagaaaaaaaaauaugcaaaauggaaaaaugcuccuccguauucaacguagucaauucaucuccaguaaccaauauggaaaauauaaccuccggauuccuaggaccacuacucguuuuacaagcaggauucuucuuacuaacaagaauacucacuauaccacaaucccuggauucuugguggacaucccuaaauuucuuaggcggaucacccguaugccuaggccaaaauagccaaaguccaacuucaaaccacuccccaacuucuugcccaccaauaugccccggcuacagauggaugugccuucgacgauucauaauauuucuauucauacuauuacuaugucuaauauuccuacucguucuauuagacuaccaaggaauguuaccaguuugcccacuaauaccugguucaacaaccacuaacacuggucccugcaaaacauguaccaccccagcccaaggaaacucaauguuccccucaugcuguugcacaaaaccaaccgacggaaauugcacaugcauacccauaccaucuucuugggcauuugcuaaauaucuaugggaaugggcaucaguacgcuucucauggcuaucucuacuaguaccauucguccaaugguucguaggccuaucaccaacaguauggcuaucugcaauauggaugaugugguacuggggucccuccuuauauucaauuguaucaccuuuuaucccacuccuacccauauucuucuguuuauggguauacauauaaggacuagucccuguucccagagcccacuuuuuuuucuuuuuuugaaauaaaauagccugucuuucagaucucaaaggcucuuuucagagccaccaaaaaaaaaaaaaaaaaaaaaaaaaaaaaaaaaaaaaaaaaaaaaaaaaaaaaaaaaaaaaaaaaaaaaaaaaaaaaaaaaaaaaaaaaaaaaaaaaaaaagaauu

SEQ ID NO: 9652 - RNA, 2036 nt, Artificial Sequence
  mRNA Design a-3 (hSL-A100-N5) comprising derived and/or modified sequence from Pf(3D7)__XP_001351122.1__HsALB_Pf-CSP(19-384)_L(SGG)_Ferritin (opt6)
aggagagggcgcuuggcuugcaaggacccugagcugcggcauugaagcacacccaacccaacucgacugaagucagccucacugaaccggaucugagaaucuucucucucugggcuugccagggcucuccgaaccuagcuagcauccucuucaauuccaacuagaaagcuuaccaugaaauggguaacauuuauaucucuauuauucuuauucuccucagcauacucacucuuucaagaauaccaaugcuacgguucuucauccaacacacgaguccuaaacgaauuaaacuacgacaaugcaggaaccaaucuauacaaugaacuugaaaugaacuacuacggaaaacaagaaaacugguacucccuaaaaaaaaacucacgaagccuaggagaaaaugacgacggaaacaacgaagacaacgaaaaacuacgaaaacccaaacacaaaaaacuaaaacaacccgccgacggcaauccagauccaaacgcaaacccaaacguagaccccaacgccaacccaaacguagauccaaacgcaaauccaaauguugauccaaaugcaaaccccaacgcaaacccaaacgcaaacccaaacgcaaacccaaacgcaaacccaaacgcaaauccaaaugcaaaucccaacgcaaauccaaacgcaaauccaaaugcaaacccaaacgcuaaucccaacgcuaacccaaacgcaaacccaaacgcaaacccgaacgcuaacccaaacgcaaacccaaacgcaaaccccaacguagacccaaacgcaaacccaaacgcaaaccccaacgcaaacccaaacgcaaacccaaacgcaaaccccaacgcaaaccccaacgcaaacccaaacgccaaccccaaugcaaacccaaacgccaacccaaacgcaaacccaaacgcaaacccaaacgcaaacccaaacgcaaauccaaacgcaaacccaaacgcaaacccaaacgcaaacccaaaugcaaacccaaacaaaaacaaccaaggaaauggacaaggacacaacaugccaaacgacccaaaccguaacguagaugaaaaugccaacgcaaacucagccguaaaaaacaacaacaacgaagaaccuucagacaaacacauaaaagaauacuuaaacaaaauacaaaacucauuaucaacugaauggucccccuguucagucacaugcggaaauggaauacaaguaagaauuaaaccagguucagccaacaaaccaaaagacgaacuagacuacgcaaacgacauugaaaaaaaaauauguaaaauggaaaaauguaguucagucuucaacguaguaaacucaucauccggaggauuauccaaagacauaauaaaacucuuaaaugaacaaguaaacaaagaaaugaacucgagcaaccucuauaugucaaugucauccuggugcuacacccauucccuagacggcgccggacuauuccuguucgaccaugcagcagaagaauaugaacacgcaaaaaagcuaaucaucuucuuaaacgaaaacaaugucccaguacaacuaaccuccauaucagcaccugaacauaaauucgaaggacuaacacaaauauuucaaaaagcauacgaacacgaacaacacauaucagaaucaauuaauaacauaguagaccacgcaaucaaaagcaaggaccacgcaacauucaacuuucuacaaugguacguagcagaacaacaugaagaagaaguacucuucaaagacaucuuagacaaaauugaacucauaggaaacgaaaaucacggacucuaccucgcagaccaguacguaaaaggaaucgcaaaaucacguaaaagcuaaggacuagucccuguucccagagcccacuuuuuuuucuuuuuuugaaauaaaauagccugucuuucagaucucaaaggcucuuuucagagccaccaaaaaaaaaaaaaaaaaaaaaaaaaaaaaaaaaaaaaaaaaaaaaaaaaaaaaaaaaaaaaaaaaaaaaaaaaaaaaaaaaaaaaaaaaaaaaaaaaaaaagaauu

SEQ ID NO: 9653 - RNA, 1997 nt, Artificial Sequence
  mRNA Design a-3 (hSL-A100-N5) comprising derived and/or modified sequence from Pf(3D7)__XP_001351122.1__HsALB_Pf-CSP(93-384)_L(PVTN)_HBsAg (opt6)
aggagagggcgcuuggcuugcaaggacccugagcugcggcauugaagcacacccaacccaacucgacugaagucagccucacugaaccggaucugagaaucuucucucucugggcuugccagggcucuccgaaccuagcuagcauccucuucaauuccaacuagaaagcuuaccaugaaauggguaacuuuuauaucccuccuauuucuauuuucaucagccuauucaaaacuaaaacaacccgcagauggaaaucccgacccaaaugcaaauccaaauguagauccaaacgccaacccaaaugucgacccaaaugcaaacccaaacguagauccuaacgcaaacccaaaugcuaauccaaacgcuaacccaaacgcaaauccaaaugcuaacccaaacgcaaacccuaacgcaaacccaaacgcuaacccaaacgcaaacccaaacgccaacccaaacgcaaaccccaacgcaaacccuaacgcaaacccaaacgcaaacccaaaugccaacccaaacgcaaacccaaacgcaaacccaaacguagaccccaacgcuaauccaaaugcaaauccaaacgcaaacccaaaugccaacccaaacgccaacccuaaugcaaacccaaacgcaaacccaaaugcaaaccccaacgcaaauccaaacgcaaauccaaaugcaaacccaaacgcuaacccaaacgcaaaccccaaugcaaacccaaacgcaaauccaaaugcaaacccaaaugcaaauccaaaugcaaacccaaauaaaaacaaccaaggaaacggacaaggccauaacaugccaaacgacccaaaccgcaacgucgaugaaaacgccaacgcaaauucagcgguuaaaaacaacaacaaugaagaacccucagacaaacacauaaaagaauacuuaaacaaaauacaaaacucacuaucgacagaaugguccccaugcuccguaaccugcgguaauggaauacaagucagaauaaaaccaggaucagcuaauaaaccaaaagacgaauuagacuacgcaaacgacauagaaaagaaaauaugcaaaauggaaaaauguucuucaguauuuaacguagucaacucaucacccguaacuaacauggaaaacauaaccucaggauuucuagguccuuuacucguacuacaagcaggauuuuuccuacuuacccgaauccuaacaauaccucaaucucuagacucaugguggacaucccuaaauuucuuaggcggaucaccaguuugccucggacaaaacucucaaucaccaacuucaaaucacuccccaacaucuugcccaccaauaugcccaggauaucgauggaugugucuacgacguuuuauaauauuucuauuuauacuacuacucugucuaauauuccuauuaguacuacucgacuaucaaggaaugcuccccgucuguccccucauacccggaucaacaacuacaaacaccggaccgugcaaaaccugcacaaccccagcucaaggaaauucaauguucccaucaugcugcuguacaaaaccaacagauggaaacugcacaugcauaccaaucccaucaagcugggccuuugccaaauauuuaugggaaugggccuccgucagauucucauggcucucccuucuaguuccauucguacaaugguuuguaggccuauccccaaccguauggcuauccgccauauggaugaugugguauuggggaccaucacuauacucaauaguauccccauucauaccacuccuacccauauucuuuugccuauggguauacauuuaaggacuagucccuguucccagagcccacuuuuuuuucuuuuuuugaaauaaaauagccugucuuucagaucucaaaggcucuuuucagagccaccaaaaaaaaaaaaaaaaaaaaaaaaaaaaaaaaaaaaaaaaaaaaaaaaaaaaaaaaaaaaaaaaaaaaaaaaaaaaaaaaaaaaaaaaaaaaaaaaaaaaagaauu

SEQ ID NO: 9654 - RNA, 1658 nt, Artificial Sequence
  mRNA Design a-3 (hSL-A100-N5) comprising derived and/or modified sequence from Pf(3D7)__XP_001351122.1__HsALB_Pf-CSP(199-377)_L(PVTN)_HBsAg (opt6)
aggagagggcgcuuggcuugcaaggacccugagcugcggcauugaagcacacccaacccaacucgacugaagucagccucacugaaccggaucugagaaucuucucucucugggcuugccagggcucuccgaaccuagcuagcauccucuucaauuccaacuagaaagcuuaccaugaaauggguaacauucauaucauuacucuucuuauuuuccucugcauacucagauccaaaugcaaacccaaaugcaaacccaaacgcaaacccaaaugccaauccaaaugcaaacccaaaugcaaacccaaacgcaaacccaaacgcaaacccaaacgcaaacccuaaugcaaacccaaaugcaaauccaaacgcuaacccaaacgcaaacccaaaugccaacccaaacgccaauccaaacgcaaacccaaacgcaaaucccaaugcaaacccuaacaaaaacaaucaaggaaacggacaaggccacaacaugccaaaugacccaaaccgcaauguagacgaaaaugccaacgcaaacuccgcuguaaaaaacaauaacaacgaagaaccuuccgauaaacauauaaaagaauacuuaaauaaaauacaaaauucauuaucaacagaauggucaccaugcucagucacaugcggaaauggaauacaaguaagaauaaaacccgguuccgcaaacaaaccaaaagacgaacuagacuacgcaaaugacaucgaaaaaaaaauaugcaaaauggaaaaauguucuucaguaccaguaacaaacauggaaaacaucaccucuggauuccuaggaccacuauuaguacuacaagcaggauucuuccuccuaacaagaauauuaacaauaccacaaucacuugacucaugguggacaucccucaauuuccuaggaggauccccaguaugucuaggucaaaacucucaaucuccaacauccaaccauucacccacaucaugcccucccauaugcccaggauaccgauggaugugccucagaagauucauaauauuccuauucauauuacuccuauguuuaaucuuucuacuagucuuauuagacuaccaaggaaugcuaccaguaugcccacuaaucccaggauccacaacaacaaacacaggccccugcaaaacauguacaacaccagcacaaggaaacucaauguucccaucaugcuguugcacaaaaccaacagacggaaacugcacaugcaucccaauaccaucaucuugggcauuugcaaaauacuuaugggaaugggcaucaguacgcuuuucauggcucucccuccucguaccauucguccaaugguucguaggucuaucaccaacaguuuggcuauccgcuauauggaugaugugguauuggggcccuucccuauacucaauaguuucaccauuuauaccacuccuaccaauauuuuucugccuuuggguauacauauaaggacuagucccuguucccagagcccacuuuuuuuucuuuuuuugaaauaaaauagccugucuuucagaucucaaaggcucuuuucagagccaccaaaaaaaaaaaaaaaaaaaaaaaaaaaaaaaaaaaaaaaaaaaaaaaaaaaaaaaaaaaaaaaaaaaaaaaaaaaaaaaaaaaaaaaaaaaaaaaaaaaaagaauu

SEQ ID NO: 9655 - RNA, 1355 nt, Artificial Sequence
  mRNA Design a-3 (hSL-A100-N5) comprising derived and/or modified sequence from Pf(3D7)__XP_001351122.1__HsALB_Pf-CSP(19-272)_L(AAY)_Pf-CSP(346-3 75)_L(AAY)_Pf-CSP(310-327) (opt6)
aggagagggcgcuuggcuugcaaggacccugagcugcggcauugaagcacacccaacccaacucgacugaagucagccucacugaaccggaucugagaaucuucucucucugggcuugccagggcucuccgaaccuagcuagcauccucuucaauuccaacuagaaagcuuaccaugaaauggguaaccuucauuucacuucucuuccuauucuccagcgcauacucacucuuccaagaauaccaaugcuacggcucaaguuccaacacacgaguacuaaacgaauuaaacuacgacaaugcuggaaccaaccuauacaacgaacucgaaaugaacuacuacgguaaacaagaaaacugguauucacuaaaaaaaaacucaaggucccuaggagaaaacgacgacggaaacaacgaagacaacgaaaaauuaagaaaaccaaaacacaaaaaacuaaaacaacccgcagacggaaaccccgacccaaacgcaaacccaaacguagauccaaacgcaaacccaaacguagacccaaacgcaaacccaaacguagacccaaacgcaaacccuaaugcaaacccaaacgcaaacccaaacgcaaacccaaacgcaaacccaaacgcaaacccaaacgcaaaccccaacgccaacccaaacgcaaacccaaacgcaaacccaaacgcaaacccaaacgcaaacccaaacgcaaacccaaacgcaaacccaaacgcaaacccaaaugcaaacccaaacgcaaacccaaacguagacccaaacgcaaacccaaacgcaaacccaaaugcaaacccaaacgcaaacccaaacgcaaacccaaacgcuaacccaaacgcaaacccaaacgcuaauccaaaugcuaaccccaacgcaaacccaaaugcaaacccaaacgcuaauccaaaugcaaauccaaacgcaaacccaaacgcaaacccaaacgcaaacccaaacgcaaacccaaacgcaaauccagccgcauacauaaaacccggcucagcaaacaaaccaaaagacgaacuagacuacgccaacgacauagaaaaaaaaauaugcaaaauggaaaaaugcucagccgcauacgaaccaucagacaaacacaucaaagaauacuuaaacaaaauacaaaacagcuuauaaggacuagucccuguucccagagcccacuuuuuuuucuuuuuuugaaauaaaauagccugucuuucagaucucaaaggcucuuuucagagccaccaaaaaaaaaaaaaaaaaaaaaaaaaaaaaaaaaaaaaaaaaaaaaaaaaaaaaaaaaaaaaaaaaaaaaaaaaaaaaaaaaaaaaaaaaaaaaaaaaaaaagaauu

SEQ ID NO: 9656 - RNA, 1403 nt, Artificial Sequence
  mRNA Design a-3 (hSL-A100-N5) comprising derived and/or modified sequence from Pf(3D7)__XP_001351122.1__HsALB_Pf-CSP(19-272)_L(AAY)_Pf-CSP(346-3 75)_L(AAY)_Pf-CSP(310-327)_L(AAY)_PADRE (opt6)
aggagagggcgcuuggcuugcaaggacccugagcugcggcauugaagcacacccaacccaacucgacugaagucagccucacugaaccggaucugagaaucuucucucucugggcuugccagggcucuccgaaccuagcuagcauccucuucaauuccaacuagaaagcuuaccaugaaauggguaacauucauaucacuacuauuccuauucucauccgccuacucacucuuucaagaauaucaaugcuacggaucaagcucaaauacaagaguacuaaacgaacuaaacuacgacaacgcaggaaccaaccuauacaacgaacuagaaaugaacuacuacggaaaacaagaaaacugguacucacuuaaaaaaaacucaagaucacuaggagaaaacgacgacggaaacaacgaagacaacgaaaaacuacgaaaaccaaaacauaaaaaacuaaaacaaccagcagacggaaacccagacccaaacgcaaauccaaacguagacccaaaugcaaacccaaacguagacccaaacgcaaacccaaacguagacccaaaugcaaacccaaacgcaaauccaaacgcaaacccaaacgcaaacccaaacgcaaacccaaacgcaaacccaaacgcaaacccaaaugcaaauccaaacgcaaacccaaaugcaaacccaaacgcaaacccaaacgcgaacccaaacgccaaccccaacgcaaacccaaacgcaaauccaaaugcaaacccaaacgccaauccaaacguagacccaaacgcaaauccaaacgcaaacccaaacgcaaacccaaacgcaaacccuaacgcaaacccaaacgcaaacccaaacgcaaacccaaacgccaacccaaacgcaaaccccaacgcaaacccaaacgcaaacccaaacgcaaaccccaacgcaaauccaaacgcuaacccaaacgcuaaccccaacgcaaacccaaaugcaaacccaaacgccaacccagccgcauacauaaaaccaggaucagcaaauaaaccaaaagacgaacuagacuacgcaaacgacauagaaaaaaaaauaugcaaaauggaaaaaugcuccgcagcauacgaaccaucagacaaacacaucaaagaauaccuaaacaaaauccaaaacucacuagccgccuacgcaaaauuugucgcagcauggacacucaaagcagcagcauaaggacuagucccuguucccagagcccacuuuuuuuucuuuuuuugaaauaaaauagccugucuuucagaucucaaaggcucuuuucagagccaccaaaaaaaaaaaaaaaaaaaaaaaaaaaaaaaaaaaaaaaaaaaaaaaaaaaaaaaaaaaaaaaaaaaaaaaaaaaaaaaaaaaaaaaaaaaaaaaaaaaaagaauu

SEQ ID NO: 9657 - RNA, 1403 nt, Artificial Sequence
  mRNA Design a-3 (hSL-A100-N5) comprising derived and/or modified sequence from Pf(3D7)__XP_001351122.1__HsALB_Pf-CSP(19-272)_L(AAY)_Pf-CSP(310-3 27)_L(AAY)_Pf-CSP(346-375)_L(AAY)_PADRE (opt6)
aggagagggcgcuuggcuugcaaggacccugagcugcggcauugaagcacacccaacccaacucgacugaagucagccucacugaaccggaucugagaaucuucucucucugggcuugccagggcucuccgaaccuagcuagcauccucuucaauuccaacuagaaagcuuaccaugaaauggguaaccuucauaucccuacuauuucuauucuccucagcauacucacuauuccaagaauaccaaugcuacggcucaucaucaaacacaagaguacuaaaugaacuaaacuacgacaacgccggaaccaaccuauacaaugaacucgaaaugaauuacuacggaaaacaagaaaacugguacucacuaaaaaaaaacucaagaagccuaggagaaaacgacgacggaaacaacgaagacaacgaaaaauuacgaaaaccaaaacauaaaaaacuaaaacaacccgccgacggaaacccagacccaaacgcaaacccaaacguagacccaaacgcaaauccaaacguagacccaaacgcaaauccaaauguagacccaaacgcaaacccaaacgcaaacccaaacgcaaacccaaacgcaaacccgaacgcaaauccaaacgcaaacccaaacgcaaacccaaacgcaaacccaaacgcaaacccaaacgcaaaccccaacgcaaacccaaaugcaaacccaaacgcaaacccaaaugcaaauccaaacgcaaacccaaacgcaaacccaaacgcaaacccaaacguagacccaaaugcaaaccccaacgcaaacccaaacgcaaacccaaacgcaaacccaaacgcaaacccaaacgcaaacccaaacgcaaacccaaacgcaaacccaaacgccaauccaaacgcaaauccaaacgcaaacccaaacgcaaacccaaacgcaaacccaaacgcaaacccaaacgcaaacccaaacgcaaacccaaaugcaaacccaaacgcaaacccagcagcauacgaaccuucagacaaacacauaaaagaauacuuaaacaaaauacaaaacucacuagcagccuacaucaaaccaggauccgcaaacaaaccaaaagacgaacuagacuacgcaaacgacauagaaaaaaaaauauguaaaauggaaaaaugcucagccgcauaugcuaaauucgucgcagcauggaccuuaaaagcagcagcauaaggacuagucccuguucccagagcccacuuuuuuuucuuuuuuugaaauaaaauagccugucuuucagaucucaaaggcucuuuucagagccaccaaaaaaaaaaaaaaaaaaaaaaaaaaaaaaaaaaaaaaaaaaaaaaaaaaaaaaaaaaaaaaaaaaaaaaaaaaaaaaaaaaaaaaaaaaaaaaaaaaaaagaauu

SEQ ID NO: 9658 - RNA, 1457 nt, Artificial Sequence
  mRNA Design a-3 (hSL-A100-N5) comprising derived and/or modified sequence from Pf(3D7)__XP_001351122.1__HsALB_Pf-CSP(19-272)_L(AAY)_Pf-CSP(310-3 27)_L(AAY)_Pf-CSP(346-375)_L(AAY)_PADRE_L(AAY)_P2 (opt6)
aggagagggcgcuuggcuugcaaggacccugagcugcggcauugaagcacacccaacccaacucgacugaagucagccucacugaaccggaucugagaaucuucucucucugggcuugccagggcucuccgaaccuagcuagcauccucuucaauuccaacuagaaagcuuaccaugaaaugggucaccuucaucucacuacuauuuuuauucuccagcgcauacucauuauuccaagaauaccaaugcuauggcucaagcucaaacacaagaguauuaaacgaacuaaacuacgauaacgccggaacaaaccuauacaacgaacucgaaaugaacuacuauggaaaacaagaaaacugguacucacuuaaaaaaaauucaagaucucuaggagaaaacgacgacggaaacaaugaagacaacgagaaauuaagaaaaccaaaacacaaaaaacuaaaacaaccagcagacggaaacccagacccaaacgcaaacccaaacguagacccaaacgcaaacccaaacguagacccaaacgcaaacccaaacguagauccgaacgcaaauccaaacgcaaauccaaacgcaaacccaaaugcaaacccaaaugcaaacccaaaugcaaacccaaacgcaaacccaaacgcaaacccaaacgcaaaccccaacgcaaacccaaacgcaaauccaaacgcaaacccaaacgcaaacccaaacgcaaaccccaacgcaaacccaaacgcaaacccgaacgcgaacccaaacguggauccaaacgcaaacccaaaugcaaaucccaacgcaaacccaaaugcaaacccaaacgcaaacccaaacgcaaacccaaacgcaaacccaaaugcaaacccaaacgcaaacccaaacgcaaacccaaacgcaaacccaaacgcaaauccaaacgcaaauccaaaugcaaacccaaacgcaaacccaaacgcaaaccccaacgcaaauccaaacgcaaacccagccgcauacgaaccaucagacaaacauauaaaagaauaucuaaacaaaauucaaaacucacucgcagcauacauaaaaccaggaagcgcaaacaaaccuaaagacgaacuagacuacgcaaacgacauagaaaaaaaaauaugcaaaauggaaaaaugcucagcagcguacgcaaaauucguagcagcauggacacuaaaagcagcagccgcagcauaccaauacauaaaagcaaauucaaaauucaucggaauuacagaacuauaaggacuagucccuguucccagagcccacuuuuuuuucuuuuuuugaaauaaaauagccugucuuucagaucucaaaggcucuuuucagagccaccaaaaaaaaaaaaaaaaaaaaaaaaaaaaaaaaaaaaaaaaaaaaaaaaaaaaaaaaaaaaaaaaaaaaaaaaaaaaaaaaaaaaaaaaaaaaaaaaaaaaagaauu

SEQ ID NO: 9659 - RNA, 1421 nt, Artificial Sequence
  mRNA Design a-3 (hSL-A100-N5) comprising derived and/or modified sequence from Pf(3D7)__XP_001351122.1__HsALB_Pf-CSP(19-272)_L(AAY)_Pf-CSP(310-3 27)_Linker (AAY)_Pf-CSP(346-397) (opt6)
aggagagggcgcuuggcuugcaaggacccugagcugcggcauugaagcacacccaacccaacucgacugaagucagccucacugaaccggaucugagaaucuucucucucugggcuugccagggcucuccgaaccuagcuagcauccucuucaauuccaacuagaaagcuuaccaugaaauggguuacauucauaucauuacuauuccucuuuuccucagcauacucacucuuucaagaauaccaaugcuacggcucauccucaaacacaagaguacucaacgaacucaacuaugacaacgcaggaacaaaccucuacaacgaacuugaaaugaauuacuauggaaaacaagaaaacugguacucauuaaaaaaaaacucaagauccuuaggcgaaaacgacgacggaaacaacgaagacaacgagaaacuccgaaaaccaaaacacaaaaaacuaaaacaaccagcagacggaaacccagacccaaacgcaaacccaaacguagacccaaacgcaaacccaaacguagacccaaacgcaaacccaaacguagacccaaacgcaaacccaaacgcaaacccaaacgcaaacccaaacgcaaacccaaacgcaaacccaaacgcaaacccaaacgcaaacccaaacgcaaacccaaacgcaaacccaaacgcaaacccaaacgccaacccaaacgcaaacccaaacgccaacccaaacgcaaacccaaacgcaaacccaaacgcaaauccaaacgccaacccaaacguagacccaaacgcaaacccaaacgcaaacccaaacgcaaacccaaacgcaaaccccaacgccaacccaaacgccaaccccaacgcaaauccaaacgcaaacccaaacgcaaaccccaacgcaaacccaaacgcaaacccaaacgcaaacccaaacgcuaacccaaacgcaaaccccaacgcaaauccaaacgcaaacccaaacgcaaacccaaaugcaaacccagcagcauaugaaccuucagauaaacacauaaaagaauaccuaaacaaaauccaaaacucucucgcagccuacaucaaaccaggaucagcaaacaaacccaaagacgaacuagacuacgcaaaugauaucgaaaaaaaaauaugcaaaauggaaaaaugcucgagcguauuuaacguaguaaacucaucaaucggacucauaaugguacuaucauuucuauuccucaacuaaggacuagucccuguucccagagcccacuuuuuuuucuuuuuuugaaauaaaauagccugucuuucagaucucaaaggcucuuuucagagccaccaaaaaaaaaaaaaaaaaaaaaaaaaaaaaaaaaaaaaaaaaaaaaaaaaaaaaaaaaaaaaaaaaaaaaaaaaaaaaaaaaaaaaaaaaaaaaaaaaaaaagaauu

SEQ ID NO: 9660 - RNA, 2021 nt, Artificial Sequence
  mRNA Design a-3 (hSL-A100-N5) comprising derived and/or modified sequence from Pf(3D7)__XP_001351122.1__LumSynt_L(GGS4-GGG)_Pf-CSP(19-397) (opt11)
aggagagggcgcuuggcuugcaaggacccugagcugcggcauugaagcacacccaacccaacucgacugaagucagccucacugaaccggaucugagaaucuucucucucugggcuugccagggcucuccgaaccuagcuagcauccucuucaauuccaacuagaaagcuuaccaugcaaauauacgagggcaaacucacggcugaaggccuacgcuuuggcaucgucgcaucacgguucaaucacgcacucguggacaggcucguagaaggugccaucgacgcaauaguacgccacggcgggcgcgaagaggacauaacgcuaguacgcguacccggaagcugggaaauccccguagccgcaggcgaacucgcacgcaaagaagacaucgacgccgugaucgcaauaggaguccugauccgaggcgcaacaccacacuucgacuacaucgccuccgaagucucaaaaggccuagcggaucugagccucgaacugcgcaaaccuauaacauucggcgucauaacagccgacacauuagaacaggccauagaaagagccggaaccaaacauggaaacaaaggcugggaagcggcccuaagcgccaucgaaauggcaaaccucuucaaaagccugcgcggaggaucaggcggcagcggcggcuccggaggaagcggcggcggucuuuuucaagaauaccaaugcuacggcuccucaucgaacacacgcguacucaaugaacugaacuacgacaaugcaggaaccaaccucuacaacgaacucgagaugaacuacuacggcaaacaagaaaacugguacucgcuaaagaaaaacuccagaucccugggcgaaaacgacgacggaaacaacgaagacaacgaaaaacuacgcaaaccaaaacacaagaaacuaaaacaaccagcagacggaaacccagacccaaacgcgaacccaaacgucgacccaaacgcaaacccaaacguagacccaaacgcaaacccaaacgucgaccccaacgcaaacccaaacgccaaccccaacgcaaaccccaacgcgaacccaaacgcgaaccccaacgcaaacccaaacgcaaaccccaacgcaaacccaaacgcaaacccaaacgccaacccgaaugccaacccgaacgcaaacccgaacgcaaaccccaacgcgaaccccaacgcaaacccaaaugccaaccccaacgcaaaccccaacguagacccgaacgcaaacccgaacgcaaacccgaacgcaaacccaaacgcaaacccaaacgccaaccccaacgccaacccaaacgcgaacccaaaugcaaaccccaacgccaacccgaacgccaacccaaacgcaaacccgaacgcaaaccccaacgcaaaccccaacgcaaaccccaacgcaaacccgaacgccaacccaaacgcaaacccaaacgcaaacccaaacaaaaacaaccaaggaaacgggcaaggccacaacaugcccaacgacccaaaccgaaauguagaugaaaacgcaaacgccaacagcgcggucaaaaacaacaacaacgaagaacccucggacaaacacauaaaagaauaccuaaacaaaauccagaacucccucucaacagaauggucccccugcucaguuaccugcgguaaugguauacaaguccgcauuaaaccgggaucugccaacaaaccaaaagaugagcuagacuacgccaacgacauagaaaagaaaaucugcaaaauggagaaaugcuccucagucuucaacguaguaaacagcucgauagggcucaucaugguacucuccuuuuuauuccucaacuaaggacuagucccuguucccagagcccacuuuuuuuucuuuuuuugaaauaaaauagccugucuuucagaucucaaaggcucuuuucagagccaccaaaaaaaaaaaaaaaaaaaaaaaaaaaaaaaaaaaaaaaaaaaaaaaaaaaaaaaaaaaaaaaaaaaaaaaaaaaaaaaaaaaaaaaaaaaaaaaaaaaaagaauu

SEQ ID NO: 9661 - RNA, 1883 nt, Artificial Sequence
  mRNA Design a-3 (hSL-A100-N5) comprising derived and/or modified sequence from Pf(3D7)__XP_001351122.1__HsALB_Pf-CSP(19-272)_L(PVTN)_HBsAg (opt11)
aggagagggcgcuuggcuugcaaggacccugagcugcggcauugaagcacacccaacccaacucgacugaagucagccucacugaaccggaucugagaaucuucucucucugggcuugccagggcucuccgaaccuagcuagcauccucuucaauuccaacuagaaagcuuaccaugaaaugggucaccuucaucucccuccucuuccucuucuccucugccuacucacucuuccaagaauaccaaugcuacggcuccucuuccaacacccgcguacucaacgaacucaacuaugacaaugcaggaaccaaccuauacaacgagcuagagaugaacuacuacggcaaacaagaaaacugguacucccucaagaaaaacucacgcucccuuggcgaaaaugacgacggcaacaacgaagacaacgaaaaacuucgcaaacccaaacacaagaaauuaaaacaaccagccgacggcaacccagaccccaacgccaaccccaacgucgaccccaacgccaacccuaacgucgaccccaacgcaaacccuaacgucgauccaaacgccaaccccaacgcuaaccccaacgcaaauccgaacgcaaaccccaacgccaacccuaacgccaaccccaacgccaacccaaacgccaaccccaacgcuaaccccaacgcaaacccgaacgccaaccccaacgccaaccccaacgcaaaccccaacgccaaccccaaugcaaaccccaacgccaacccaaaugccaaccccaacgucgaccccaacgcaaaccccaacgcuaacccuaacgcuaacccaaacgccaacccaaacgcuaaccccaacgccaaccccaacgccaaccccaacgcaaacccaaacgcaaacccuaacgccaacccuaacgcaaaccccaacgcgaaccccaacgcaaaccccaacgcaaaccccaacgccaaccccaacgccaacccaaacgccaauccaaacgcaaaucccccagucaccaacauggaaaacaucaccucaggcuuccucggcccccuucucguccuacaagcugguuucuuccuucuaacccgcauccucacgaucccccaaucccucgacucaugguggaccucacucaacuuucucggaggcucacccguaugccucggacaaaacucccaaucccccaccuccaaccauuccccaaccucaugcccaccaauaugccccggcuaccguuggaugugccuccgccguuucaucauauuccuuuucauacuccuccucugccucaucuuccugcucgugcuccuagacuaucaagguaugcuacccguaugcccacucauccccggcucaaccacgacaaacacuggccccugcaaaacaugcaccacacccgcacaaggaaacuccauguuccccucaugcugcugcaccaaaccaacagacggaaacuguaccugcaucccuauccccuccuccugggccuucgcaaaauaucuaugggagugggccagcguacgcuuuuccuggcuuucccuccugguccccuucguccaaugguucguaggccucuccccaaccguauggcuauccgcaaucuggaugaugugguacuggggcccaucucucuacucaauaguaucacccuucaucccacuccuccccaucuucuucugccucuggguauacaucuaaggacuagucccuguucccagagcccacuuuuuuuucuuuuuuugaaauaaaauagccugucuuucagaucucaaaggcucuuuucagagccaccaaaaaaaaaaaaaaaaaaaaaaaaaaaaaaaaaaaaaaaaaaaaaaaaaaaaaaaaaaaaaaaaaaaaaaaaaaaaaaaaaaaaaaaaaaaaaaaaaaaaagaauu

SEQ ID NO: 9662 - RNA, 2000 nt, Artificial Sequence
  mRNA Design a-3 (hSL-A100-N5) comprising derived and/or modified sequence from Pf(3D7)__XP_001351122.1__HsALB_Pf-CSP(19-272)_L(AAY)_Pf-CSP(346-3 65)_L(AAY)_PADRE_L(PVTN)_HBsAg (opt11)
aggagagggcgcuuggcuugcaaggacccugagcugcggcauugaagcacacccaacccaacucgacugaagucagccucacugaaccggaucugagaaucuucucucucugggcuugccagggcucuccgaaccuagcuagcauccucuucaauuccaacuagaaagcuuaccaugaaauggguaaccuucauaucccuucuauucuuauucucuuccgcauacucccucuuccaagaauaucagugcuacggcucauccucaaacacacgaguccucaacgaacucaacuacgacaacgccggcaccaaucucuacaacgaacucgaaaugaacuacuacggcaaacaagaaaacugguacucccuuaagaaaaacucacgcucucucggcgaaaacgacgacggcaacaacgaagacaacgaaaaauuacgcaaacccaaacacaagaaacucaaacaaccagccgacggcaacccagaccccaaugcaaacccuaacgucgaccccaacgccaacccuaacgucgacccaaacgccaacccgaacgucgaccccaacgcaaacccaaacgccaaccccaaugccaaucccaacgccaacccuaacgccaaccccaacgccaaccccaacgccaacccuaacgccaaccccaaugcaaacccaaacgccaacccaaacgcaaacccaaacgccaauccaaacgccaacccaaacgccaaccccaacgccaacccaaacgccaaucccaacgccaaccccaacguagaccccaaugcgaacccaaacgccaacccuaacgccaaccccaacgcaaacccaaacgcuaacccaaacgcaaaccccaacgcaaaccccaacgcaaacccgaacgcgaaccccaacgccaauccaaacgcaaacccuaacgcaaacccaaacgccaacccaaacgccaacccaaacgcaaacccaaacgccaauccaaacgcaaacccgaacgcaaaccccgccgcuuacaucaaacccggaucggccaacaaacccaaagacgaacuugauuacgccaacgacaucgaagcagccuacgcaaaauucguagcggccuggacccuaaaagcagcagcacccgucacaaacauggaaaacaucacaucuggcuucuuaggcccacuccuaguccuccaggccggcuucuuccuacuaacccguauacucaccauaccacaaucacucgacucaugguggaccucccuaaacuuccucggcggaucacccgucugccugggccaaaacucgcaaucccccaccucaaaucauucgcccacaucaugcccgcccaucugccccggcuaccgguggaugugccuccgcagauucauaaucuuccucuucauacuacuacuuugccuaaucuuccucuuaguccuacucgacuaccaaggcaugcuccccgucugcccccuuauacccggcuccaccaccaccaauaccggccccugcaaaaccugcacaacacccgcccaaggcaacucaauguucccguccugcuguugcaccaaaccaaccgacggaaauugcacaugcaucccaauccccucaucaugggcauucgccaaauaccucugggaaugggccuccguccguuucuccuggcucagccuacucguucccuucguccaaugguuugucggccuuucaccuacaguauggcuauccgccauauggaugaugugguacuggggacccucacucuacucaauugucucccccuucaucccauuacuccccaucuucuucugccucugggucuacauauaaggacuagucccuguucccagagcccacuuuuuuuucuuuuuuugaaauaaaauagccugucuuucagaucucaaaggcucuuuucagagccaccaaaaaaaaaaaaaaaaaaaaaaaaaaaaaaaaaaaaaaaaaaaaaaaaaaaaaaaaaaaaaaaaaaaaaaaaaaaaaaaaaaaaaaaaaaaaaaaaaaaaagaauu

SEQ ID NO: 9663 - RNA, 2219 nt, Artificial Sequence
  mRNA Design a-3 (hSL-A100-N5) comprising derived and/or modified sequence from Pf(3D7)__XP_001351122.1__HsALB_Pf-CSP(19-384)_L(PVTN)_HBsAg (opt11)
aggagagggcgcuuggcuugcaaggacccugagcugcggcauugaagcacacccaacccaacucgacugaagucagccucacugaaccggaucugagaaucuucucucucugggcuugccagggcucuccgaaccuagcuagcauccucuucaauuccaacuagaaagcuuaccaugaaaugggucaccuucauaucacuccuauuccuauuuucaagcgccuacucccucuuccaagaauaucaaugcuauggcucaagcucaaacacccgcguccucaacgagcuaaacuacgacaacgcaggaaccaaccucuacaacgaacuggaaaugaacuacuacggaaaacaagagaacugguacuccuuaaagaaaaacucccgcucccucggcgaaaacgaugacgguaacaacgaagacaaugaaaaacuccgaaaacccaaacacaagaaacuaaaacaaccagccgacggaaaccccgacccgaacgcaaaccccaacguagacccaaacgcaaacccuaauguagacccaaacgccaacccaaacgucgacccaaacgcaaacccaaacgcuaaccccaacgccaacccaaacgccaaccccaacgccaaccccaaugccaacccaaacgcgaaccccaacgcaaaccccaacgccaacccgaacgccaacccaaacgccaacccaaacgccaaccccaacgcgaacccaaacgccaacccaaacgcuaaccccaacgcaaaccccaacgccaacccuaacgucgacccaaacgccaaucccaacgccaaccccaacgcaaaccccaacgccaacccgaacgcgaaccccaacgcaaaccccaacgcaaacccaaacgccaaccccaacgccaacccaaacgccaacccgaacgccaacccaaacgcgaaucccaaugccaaccccaacgccaauccuaaugcaaacccaaacgcaaaccccaacgccaauccgaacgcaaacccgaacaaaaacaaccaagguaacggccaaggccacaacaugcccaacgaccccaaccgcaacgucgacgaaaacgcaaacgccaacuccgcaguuaaaaacaacaacaacgaagaaccaucagacaaacacauaaaagaauaccucaacaaaauccaaaacucgcucuccaccgaauggucccccuguagcguaaccugcgguaauggaauacaaguccgaaucaaaccaggcucugccaacaaacccaaagacgaacuagacuacgccaacgacauugaaaagaaaaucugcaaaauggaaaaauguagcuccgucuucaacguagucaacuccucccccguuaccaacauggagaacauaaccuccggcuuccucggcccccuucucgugcuacaggccggauucuuccuccuaaccaggauccuaaccaucccccagucacucgacuccugguggaccucacucaacuuccucggcggaucccccgucugccucggacaaaacucccaaucccccaccucaaaccacuccccaaccucuugcccgcccauaugccccgguuaccgcuggaugugccuucgccgcuucaucauauuucuauucauccuccuucucugccuaauauuccuacucguacuccucgacuaccaaggcaugcuacccgucugcccucuuauacccggauccacgacaaccaacaccggccccugcaaaaccugcaccacacccgcccaaggcaacucuauguuccccucaugcugcugcacaaaacccaccgacggcaacugcacaugcauaccaauccccucuuccugggccuuugccaaauaccuuugggaaugggcuuccguccguuuuuccugguuaucccuccuggucccauucguccaaugguucgucggccuuucaccaaccgucuggcuauccgccaucuggaugaugugguacuggggucccucccucuacagcaucgucucaccauuuaucccccuccugcccaucuucuucugcuuguggguauacauaugaggacuagucccuguucccagagcccacuuuuuuuucuuuuuuugaaauaaaauagccugucuuucagaucucaaaggcucuuuucagagccaccaaaaaaaaaaaaaaaaaaaaaaaaaaaaaaaaaaaaaaaaaaaaaaaaaaaaaaaaaaaaaaaaaaaaaaaaaaaaaaaaaaaaaaaaaaaaaaaaaaaaagaauu

SEQ ID NO: 9664 - RNA, 2036 nt, Artificial Sequence
  mRNA Design a-3 (hSL-A100-N5) comprising derived and/or modified sequence from Pf(3D7)__XP_001351122.1__HsALB_Pf-CSP(19-384)_L(SGG)_Ferritin (opt11)
aggagagggcgcuuggcuugcaaggacccugagcugcggcauugaagcacacccaacccaacucgacugaagucagccucacugaaccggaucugagaaucuucucucucugggcuugccagggcucuccgaaccuagcuagcauccucuucaauuccaacuagaaagcuuaccaugaaaugggucaccuucauaucacuacuuuuccuguucuccucagcauacucacucuuccaagaguaccaaugcuacggcucaucauccaauacccgcguacuuaacgaauuaaacuacgacaacgcaggcaccaaccucuacaacgaacucgaaaugaacuauuacggaaaacaagaaaacugguacucacuaaagaaaaacagcagaucccucggcgaaaacgacgacggcaauaacgaagacaacgaaaaacugagaaaaccuaaacacaagaaacucaaacaacccgcagacggcaaccccgaccccaacgccaacccaaacguagaccccaacgccaaccccaacgucgaccccaacgccaacccuaaugucgacccaaacgcaaacccuaacgcaaaccccaaugccaacccaaacgccaaccccaacgcaaaccccaacgcaaauccaaacgcaaaucccaacgcaaaccccaaugccaaccccaacgcaaacccaaacgccaaccccaacgcaaaccccaacgcuaacccaaacgccaacccaaacgcaaacccaaacgccaaccccaacgcuaaccccaacgucgaccccaacgccaaccccaacgcaaacccaaacgccaaccccaaugcaaacccaaacgccaaccccaacgcaaacccaaacgccaacccaaacgccaaccccaacgcaaaccccaacgcuaaccccaacgcaaaccccaaugcaaacccgaacgccaacccaaacgcaaacccaaacgccaacccaaacgccaaccccaacgccaacccaaacgccaacccaaacaaaaacaaccaagguaacggacaaggccacaacaugcccaacgauccuaaccgcaacguagacgaaaacgccaacgcaaacagcgcagucaaaaacaacaacaacgaggaaccaucagacaaacacaucaaagaauaccucaacaaaauccaaaacucccuauccacagaauggucacccugcuccguaaccugcggcaacggcauccaaguacgcaucaaacccggauccgcaaacaaaccaaaagaugaauuagauuaugcaaacgacauagaaaagaaaauaugcaaaauggaaaaaugcuccuccguauucaacguagucaacuccucuucagggggacucuccaaagacaucaucaaacuucucaacgaacaagucaacaaagagaugaacagcuccaaccucuacaugucaaugucaagcuggugcuacacacacucacuggacggcgccggccucuuccuauucgaccacgccgcagaagaauacgaacacgccaagaaacuuauaaucuuccuaaacgaaaauaacguaccuguccaacucacaucaaucucggccccagaacauaaauucgaagggcucacgcaaauauuucaaaaagcauacgaacacgaacagcacaucuccgaaucaaucaacaacauugucgaccacgcaaucaaauccaaagaccacgccacauucaacuuccuacaaugguacguggccgaacaacacgaagaagaaguccucuucaaagacauacuagacaaaaucgaacuaaucggcaacgaaaaccacggccucuaccuagccgaccaauacguaaaaggaaucgcgaaaucccgcaaauccuaaggacuagucccuguucccagagcccacuuuuuuuucuuuuuuugaaauaaaauagccugucuuucagaucucaaaggcucuuuucagagccaccaaaaaaaaaaaaaaaaaaaaaaaaaaaaaaaaaaaaaaaaaaaaaaaaaaaaaaaaaaaaaaaaaaaaaaaaaaaaaaaaaaaaaaaaaaaaaaaaaaaaagaauu

SEQ ID NO: 9665 - RNA, 1997 nt, Artificial Sequence
  mRNA Design a-3 (hSL-A100-N5) comprising derived and/or modified sequence from Pf(3D7)__XP_001351122.1__HsALB_Pf-CSP(93-384)_L(PVTN)_HBsAg (opt11)
aggagagggcgcuuggcuugcaaggacccugagcugcggcauugaagcacacccaacccaacucgacugaagucagccucacugaaccggaucugagaaucuucucucucugggcuugccagggcucuccgaaccuagcuagcauccucuucaauuccaacuagaaagcuuaccaugaaaugggucaccuuuaucucacuccuauuucucuucucuuccgcauacuccaaacucaaacaacccgcagacggaaaccccgacccaaacgcaaaccccaacguagaccccaacgccaaccccaacgucgaccccaacgccaaccccaacguagaccccaacgcaaaccccaacgccaacccaaacgccaaccccaacgccaaccccaacgccaaucccaacgccaacccaaacgcaaaucccaacgcaaaccccaacgccaaccccaacgccaacccaaacgccaauccaaacgcaaacccuaacgccaacccuaacgcgaaccccaacgccaaccccaacgcaaaccccaacgccaaccccaaugucgaccccaacgccaaccccaacgccaaccccaacgcaaaccccaacgcaaacccaaacgccaaucccaacgccaaccccaacgcaaacccuaacgccaaccccaaugccaauccuaacgccaaccccaacgccaacccuaacgccaacccaaacgccaaccccaacgccaaccccaacgccaacccuaacgccaacccuaacgccaacccaaacgccaauccaaacaagaacaaccaaggcaacggucaaggccacaauaugccaaacgacccaaaccgaaacguagacgaaaacgccaacgccaacuccgccgucaaaaacaacaacaacgaagaacccuccgacaaacacaucaaagaauaucugaacaaaauccaaaacucccucuccaccgaauggucccccugcuccgucacuuguggcaauggcauacaaguccgcaucaaacccggcucagccaacaaacccaaagacgaacucgacuacgcaaacgacaucgaaaagaaaauaugcaaaauggaaaaaugcuccucugucuucaacgucgucaacuccucgcccguaaccaacauggaaaacaucaccucaggauuccucggcccccuacucguccuccaagccggcuucuuccuccucacccgaauccuuacaaucccccaaucccuugacucaugguggaccucccuuaauuuccucggcgguucccccgucugccuuggccaaaacucacaaucccccaccucaaaccacucccccacuuccugcccgcccauaugccccggcuaccgcuggaugugccuccgccgguucaucauauuccucuucauccuacuccucugccuuauauuucuauuaguccuccuagacuaccaaggaaugcuccccguaugcccacuaauccccggauccaccaccaccaacaccggccccugcaaaaccugcaccaccccugcacaaggaaacuccauguucccaucuuguugcugcacaaaaccaaccgacggcaacuguaccugcauccccaucccuucaucaugggccuucgccaaauaccuaugggaaugggccucaguacguuucuccuggcuaucccuccucgucccauucguucaaugguucgucggccuaucccccacgguauggcucuccgcaauauggaugaugugguacuggggccccucacuauacaguauaguuucccccuucauaccccuccuccccauauucuucugccucuggguauacaucuagggacuagucccuguucccagagcccacuuuuuuuucuuuuuuugaaauaaaauagccugucuuucagaucucaaaggcucuuuucagagccaccaaaaaaaaaaaaaaaaaaaaaaaaaaaaaaaaaaaaaaaaaaaaaaaaaaaaaaaaaaaaaaaaaaaaaaaaaaaaaaaaaaaaaaaaaaaaaaaaaaaaagaauu

SEQ ID NO: 9666 - RNA, 1658 nt, Artificial Sequence
  mRNA Design a-3 (hSL-A100-N5) comprising derived and/or modified sequence from Pf(3D7)__XP_001351122.1__HsALB_Pf-CSP(199-377)_L(PVTN)_HBsAg (opt11)
aggagagggcgcuuggcuugcaaggacccugagcugcggcauugaagcacacccaacccaacucgacugaagucagccucacugaaccggaucugagaaucuucucucucugggcuugccagggcucuccgaaccuagcuagcauccucuucaauuccaacuagaaagcuuaccaugaaauggguaaccuucaucucccuccuauucuuauucucaucagccuacuccgacccaaacgcaaaccccaaugccaaccccaacgccaaccccaacgccaaucccaacgccaaccccaacgccaaucccaaugcuaaccccaacgccaacccaaacgccaacccaaacgcaaaccccaacgccaaccccaacgccaaccccaacgccaacccaaacgccaaccccaacgcaaaccccaacgccaacccaaacgccaaccccaacgccaacccaaacaaaaacaaucaaggcaacggccaaggacacaacaugcccaacgaccccaaccgcaacgucgacgaaaacgcaaacgccaacucugcagucaaaaacaacaacaacgaagaacccuccgacaaacacauaaaagaauaccucaacaaaauccaaaacucccucuccacagaaugguccccaugcuccgucacgugcggcaacggcauccaaguacgcaucaaacccggcucugccaacaaaccuaaagacgaacucgacuacgccaacgacaucgaaaagaaaaucugcaaaauggaaaaaugcuccucaguccccguaacuaacauggaaaacaucacguccggcuuccucggcccccuccuaguccuccaagccggcuucuuccuacucacacgcauucuuaccaucccgcaaucacucgacuccugguggaccucccucaacuucuuaggcggcuccccugucugccucggccaaaacucacaaucccccacuucaaaccacucacccaccagcugcccacccauaugcccaggauaccgcuggaugugccuccgccguuucauaaucuuccucuucauacuccuacucugccuaaucuuccuccucguacuccuagacuaccaaggcaugcuccccgucugcccacucauccccggaagcacuacaaccaacaccggccccugcaaaacaugcaccacccccgcacaaggcaacuccauguuccccuccugcugcugcacaaaacccacugauggcaacugcacuugcauccccauccccuccucaugggccuucgccaaauaucucugggaaugggccagcguccgguucucuuggcucucacuccuaguccccuucguucaaugguucguaggccuaucccccaccgucuggcucuccgcaauauggaugaugugguauuggggccccucccucuacuccauuguaucccccuucaucccacuacuccccaucuucuucugccuuugggucuacauauaaggacuagucccuguucccagagcccacuuuuuuuucuuuuuuugaaauaaaauagccugucuuucagaucucaaaggcucuuuucagagccaccaaaaaaaaaaaaaaaaaaaaaaaaaaaaaaaaaaaaaaaaaaaaaaaaaaaaaaaaaaaaaaaaaaaaaaaaaaaaaaaaaaaaaaaaaaaaaaaaaaaaagaauu

SEQ ID NO: 9667 - RNA, 1355 nt, Artificial Sequence
  mRNA Design a-3 (hSL-A100-N5) comprising derived and/or modified sequence from Pf(3D7)__XP_001351122.1__HsALB_Pf-CSP(19-272)_L(AAY)_Pf-CSP(346-3 75)_L(AAY)_Pf-CSP(310-327) (opt11)
aggagagggcgcuuggcuugcaaggacccugagcugcggcauugaagcacacccaacccaacucgacugaagucagccucacugaaccggaucugagaaucuucucucucugggcuugccagggcucuccgaaccuagcuagcauccucuucaauuccaacuagaaagcuuaccaugaaauggguaaccuucaucucacuccuauuccuguucuccagugcauacucacucuuccaagaauaccaaugcuacggcuccagcagcaacacgcgaguccucaacgaacuaaacuacgauaacgccggaaccaaccuuuacaacgaacucgaaaugaacuacuacggcaaacaagaaaacugguacucacuaaaaaaaaacagcagaucacuaggcgaaaacgacgacggaaacaacgaagacaacgaaaaacuacgcaagcccaaacacaagaaacucaaacaacccgcagacggaaacccagaccccaacgcaaaccccaacguagaccccaacgcaaaccccaacguagaccccaacgcaaaucccaacguagacccaaacgcaaaccccaacgcaaacccaaacgcaaacccaaacgcgaacccaaacgcaaacccaaacgcaaacccgaacgccaacccaaacgcaaacccaaacgcuaaccccaacgcaaacccaaacgcaaacccaaacgcaaacccaaacgcaaacccaaacgcaaacccaaacgcaaacccgaacgcaaacccaaacgcaaaccccaacguagacccaaacgccaacccaaacgcaaaccccaacgccaacccaaacgcaaacccaaacgcaaacccaaacgcaaacccaaacgcaaacccaaacgcaaacccaaacgcaaaccccaacgcgaacccaaacgccaacccaaacgcaaacccaaacgcgaacccaaacgccaaccccaacgcaaaccccaacgcaaaccccaacgcaaacccaaacgcaaaccccgccgcuuacauaaaacccggcucggccaauaaaccaaaagacgaacucgacuacgccaacgacauagaaaaaaaaauaugcaaaauggaaaaaugcagcgccgccuacgaaccaucagacaaacacaucaaagaauaccucaacaaaauacaaaacagccucuaaggacuagucccuguucccagagcccacuuuuuuuucuuuuuuugaaauaaaauagccugucuuucagaucucaaaggcucuuuucagagccaccaaaaaaaaaaaaaaaaaaaaaaaaaaaaaaaaaaaaaaaaaaaaaaaaaaaaaaaaaaaaaaaaaaaaaaaaaaaaaaaaaaaaaaaaaaaaaaaaaaaaagaauu

SEQ ID NO: 9668 - RNA, 1403 nt, Artificial Sequence
  mRNA Design a-3 (hSL-A100-N5) comprising derived and/or modified sequence from Pf(3D7)__XP_001351122.1__HsALB_Pf-CSP(19-272)_L(AAY)_Pf-CSP(346-3 75)_L(AAY)_Pf-CSP(310-327)_L(AAY)_PADRE (opt11)
aggagagggcgcuuggcuugcaaggacccugagcugcggcauugaagcacacccaacccaacucgacugaagucagccucacugaaccggaucugagaaucuucucucucugggcuugccagggcucuccgaaccuagcuagcauccucuucaauuccaacuagaaagcuuaccaugaaauggguaacauuuaucucccuccucuuccucuuuuccuccgcauacucacucuuccaagaauaccaaugcuacggaucaagcuccaacacccgcguccuuaacgaacuuaacuacgacaacgccggcaccaacuuauacaacgaacucgagaugaacuacuacggcaaacaagaaaacugguacucccucaaaaaaaacuccagaucccucggcgaaaacgacgacggaaacaacgaagacaacgaaaaacuccgcaaacccaaacacaaaaaacucaaacaacccgcugacggcaacccugaccccaacgccaaccccaacguagaccccaacgccaaucccaacguagacccaaacgccaaccccaacguagaccccaacgccaaccccaacgcaaacccaaacgccaaccccaacgccaaccccaacgcgaacccaaacgccaaccccaacgccaacccuaacgccaacccgaacgccaaccccaacgccaaccccaacgccaaccccaacgcgaaccccaacgcaaaccccaacgccaaccccaacgcaaaccccaacgccaaccccaacgccaaccccaacguagaccccaacgccaacccaaacgccaacccaaacgcaaaccccaacgccaauccaaacgcaaaccccaacgcaaaccccaaugccaacccaaacgccaaccccaacgccaacccaaacgccaacccaaacgccaaccccaacgcaaacccaaacgcaaaccccaacgcaaacccuaacgccaacccaaacgccaacccaaacgcaaaccccaacgcaaaccccgccgccuacaucaaaccaggcuccgccaauaaaccaaaagacgaacucgacuacgcaaaugacauagaaaaaaaaauaugcaaaauggaaaaaugcuccgcagccuacgaacccagcgacaaacauaucaaagaauacuuaaacaaaauccaaaacucccuagccgccuacgccaaauucgucgcagccuggacccucaaagccgccgccuaaggacuagucccuguucccagagcccacuuuuuuuucuuuuuuugaaauaaaauagccugucuuucagaucucaaaggcucuuuucagagccaccaaaaaaaaaaaaaaaaaaaaaaaaaaaaaaaaaaaaaaaaaaaaaaaaaaaaaaaaaaaaaaaaaaaaaaaaaaaaaaaaaaaaaaaaaaaaaaaaaaaaagaauu

SEQ ID NO: 9669 - RNA, 1403 nt, Artificial Sequence
  mRNA Design a-3 (hSL-A100-N5) comprising derived and/or modified sequence from Pf(3D7)__XP_001351122.1__HsALB_Pf-CSP(19-272)_L(AAY)_Pf-CSP(310-3 27)_L(AAY)_Pf-CSP(346-375)_L(AAY)_PADRE (opt11)
aggagagggcgcuuggcuugcaaggacccugagcugcggcauugaagcacacccaacccaacucgacugaagucagccucacugaaccggaucugagaaucuucucucucugggcuugccagggcucuccgaaccuagcuagcauccucuucaauuccaacuagaaagcuuaccaugaaaugggugaccuuuaucucacuccucuuccucuucucaagcgcauacucacucuuccaagaauaccaaugcuacgguucaagcucaaacacaagaguccucaacgaacucaacuacgacaacgccggaaccaaccucuacaacgaacucgaaaugaacuacuacggcaaacaagaaaacugguacucacucaaaaaaaacagcaggucccuaggcgaaaacgacgacggaaacaacgaagacaacgaaaaacuccgcaaaccaaaacacaaaaaacugaaacaacccgcagacggaaacccagaccccaacgcaaacccgaacgucgacccgaacgccaacccaaacguagacccaaacgcaaaccccaacgucgacccaaacgcaaacccaaacgcaaacccaaacgcaaacccgaacgcaaacccaaacgcgaacccaaacgcaaacccaaacgcaaacccaaacgccaacccaaacgcaaacccaaaugcaaaccccaacgcaaacccgaacgcaaacccaaacgcaaaccccaacgcaaacccaaacgcuaacccaaacgcgaaccccaacgcaaacccaaacguggacccaaacgcaaacccaaacgcaaacccaaacgcgaacccgaacgcaaacccaaacgcgaacccaaacgcaaaccccaacgcaaacccaaacgcaaacccaaacgccaacccaaacgcaaacccaaacgcgaaccccaacgccaacccaaacgcaaacccaaacgcaaacccaaacgcaaacccaaacgcaaacccaaacgccaacccaaacgcaaacccagcugccuacgaacccuccgacaaacacaucaaagaguaccugaacaaaauccaaaacucccucgcagccuacaucaagcccggauccgcaaacaaacccaaagacgaacucgacuacgccaacgacauagaaaaaaaaaucugcaaaauggaaaaaugcucagccgcauacgcaaaauucguagcagccuggacccuaaaagcggcagcauaaggacuagucccuguucccagagcccacuuuuuuuucuuuuuuugaaauaaaauagccugucuuucagaucucaaaggcucuuuucagagccaccaaaaaaaaaaaaaaaaaaaaaaaaaaaaaaaaaaaaaaaaaaaaaaaaaaaaaaaaaaaaaaaaaaaaaaaaaaaaaaaaaaaaaaaaaaaaaaaaaaaaagaauu

SEQ ID NO: 9670 - RNA, 1457 nt, Artificial Sequence
  mRNA Design a-3 (hSL-A100-N5) comprising derived and/or modified sequence from Pf(3D7)__XP_001351122.1__HsALB_Pf-CSP(19-272)_L(AAY)_Pf-CSP(310-3 27)_L(AAY)_Pf-CSP(346-375)_L(AAY)_PADRE_L(AAY)_P2 (opt11)
aggagagggcgcuuggcuugcaaggacccugagcugcggcauugaagcacacccaacccaacucgacugaagucagccucacugaaccggaucugagaaucuucucucucugggcuugccagggcucuccgaaccuagcuagcauccucuucaauuccaacuagaaagcuuaccaugaaaugggugaccuucauaucacuauuauuccucuucucaagcgcauacucacucuuccaagaauaccaaugcuacggcuccuccucaaacacgcgcguacucaacgaacuaaacuacgacaacgccggaacaaaccucuacaacgaacuagaaaugaacuacuacggcaaacaagaaaacugguacucccuaaaaaaaaacucaagaucccuaggcgagaaugacgacggcaacaacgaagacaacgaaaaacuccgcaaacccaaacacaaaaaacucaaacaacccgccgacggaaacccagacccaaacgccaacccaaacgucgacccaaacgcaaaccccaacguagaccccaacgcaaacccaaacguagacccaaacgcaaacccaaacgcaaacccaaacgcaaaccccaacgccaacccaaacgcaaacccaaacgccaauccaaacgcaaacccaaaugccaacccaaacgcaaacccaaacgcaaacccaaacgccaaccccaacgcaaacccaaacgcaaacccaaacgccaacccaaacgcaaacccaaacgcaaaccccaacgccaacccgaacguagaccccaacgcaaaccccaacgcaaacccaaacgccaauccaaacgcaaaccccaacgcaaaccccaacgcaaaccccaacgccaauccaaacgccaaccccaacgcgaacccgaacgcaaacccaaacgcaaacccaaacgcaaacccaaacgcaaacccaaacgcaaacccaaacgcaaacccgaacgcaaaccccaacgccaacccaaacgcaaacccagccgcauacgaacccucagacaaacacauaaaagaauaccuaaacaaaauccaaaacucacucgcugccuacaucaaaccaggaagcgcaaacaaacccaaagacgaacucgauuacgccaacgacaucgaaaaaaaaaucugcaaaauggaaaaaugcuccgccgccuacgcaaaauucgucgcagccuggacucuaaaagccgccgcagccgcauaccaauacauaaaagccaacucaaaauucaucggaaucaccgaacuguaaggacuagucccuguucccagagcccacuuuuuuuucuuuuuuugaaauaaaauagccugucuuucagaucucaaaggcucuuuucagagccaccaaaaaaaaaaaaaaaaaaaaaaaaaaaaaaaaaaaaaaaaaaaaaaaaaaaaaaaaaaaaaaaaaaaaaaaaaaaaaaaaaaaaaaaaaaaaaaaaaaaaagaauu

SEQ ID NO: 9671 - RNA, 1421 nt, Artificial Sequence
  mRNA Design a-3 (hSL-A100-N5) comprising derived and/or modified sequence from Pf(3D7)__XP_001351122.1__HsALB_Pf-CSP(19-272)_L(AAY)_Pf-CSP(310-3 27)_Linker (AAY)_Pf-CSP(346-397) (opt11)
aggagagggcgcuuggcuugcaaggacccugagcugcggcauugaagcacacccaacccaacucgacugaagucagccucacugaaccggaucugagaaucuucucucucugggcuugccagggcucuccgaaccuagcuagcauccucuucaauuccaacuagaaagcuuaccaugaaaugggucaccuucaucucacuccuguuccuauucucgagcgcauacucccucuuccaagaauaccagugcuacggcucaagcucaaacacacgcguacucaacgaacuaaacuacgacaacgccggaaccaaccucuacaacgaacuagaaaugaacuacuacggcaaacaagagaacugguacucucuaaagaaaaacagcagaucccugggcgagaacgacgacggaaacaacgaagacaacgagaaacuacgcaaacccaaacacaagaaacuaaaacaacccgcagauggaaacccagauccaaacgcaaacccaaacgucgacccuaacgcaaaccccaacguagaccccaacgcaaaccccaacguagacccaaacgccaacccaaacgccaacccaaacgccaacccgaacgcaaaccccaaugccaacccaaacgccaacccgaacgccaacccaaacgcgaaccccaacgccaacccaaacgcaaacccaaacgcaaacccuaacgcaaaccccaacgccaacccaaaugccaacccaaacgcaaacccaaacgcaaacccaaacgccaaccccaacguagacccaaacgcaaaccccaacgcaaacccaaacgcaaacccaaacgccaacccaaacgcaaacccaaacgcaaacccaaacgcaaacccgaacgccaaccccaacgcaaacccaaacgcaaacccaaacgccaacccaaacgccaacccaaacgcaaaccccaacgcaaaccccaacgccaaccccaacgccaacccaaacgcaaacccaaacgcaaacccagccgcauacgaacccucagacaaacacauaaaagaauaccucaauaaaauccaaaacucacuugcagccuacauaaaaccaggcagcgcgaacaaacccaaagacgaacucgacuacgcgaacgacauagaaaagaaaaucugcaaaauggaaaaaugcucauccgucuucaaugucguaaacucauccauaggccuaaucaugguccucuccuuccuauuccucaacuaaggacuagucccuguucccagagcccacuuuuuuuucuuuuuuugaaauaaaauagccugucuuucagaucucaaaggcucuuuucagagccaccaaaaaaaaaaaaaaaaaaaaaaaaaaaaaaaaaaaaaaaaaaaaaaaaaaaaaaaaaaaaaaaaaaaaaaaaaaaaaaaaaaaaaaaaaaaaaaaaaaaaagaauu

SEQ ID NO: 9672 - RNA, 1865 nt, Artificial Sequence
  mRNA Design i-3 (hSL-A100-N5) comprising derived and/or modified sequence from Pf(3D7)__XP_001351122.1__LumSynt_L(GGS4-GGG)_Pf-CSP(19-397) (opt1)
aggagaaagcuuaccaugcagaucuacgagggcaagcugaccgccgaggggcuccgcuucggcaucguggccagccgguucaaccacgcgcuggucgaccgccugguggagggggccaucgacgccaucgugcggcacggcgggcgcgaggaggacaucacccucguccgggugcccggcuccugggagaucccgguggccgccggcgagcuggcccgcaaggaggacaucgacgcggucaucgccaucggggugcugauccggggcgccacgccccacuucgacuacaucgccagcgagguguccaaggggcucgcggaccugagccuggagcuccgcaagcccaucaccuucggcgucaucaccgccgacacccuggagcaggccaucgagcgggccgggacgaagcacggcaacaagggcugggaggccgcgcuguccgccaucgagauggccaaccucuucaagagccugcgcggcgggagcggcggguccggcgggagcggcggcuccgggggcgggcuguuccaggaguaccagugcuacggcuccagcuccaacacccgggugcucaacgagcugaacuacgacaacgcggggaccaaccuguacaacgagcucgagaugaacuacuacggcaagcaggagaacugguacagccugaagaagaacucccgcagccugggggagaacgacgacggcaacaacgaggacaacgagaagcuccggaagcccaagcacaagaagcugaagcagccggccgacgggaaccccgaccccaacgccaaccccaacguggacccgaacgccaaccccaacgucgaccccaacgccaaccccaacguggacccgaacgcgaaccccaacgccaaccccaacgccaaccccaacgccaacccgaacgcgaaccccaacgccaaccccaacgccaaccccaacgccaacccgaacgccaaccccaacgcgaaccccaacgccaaccccaacgccaacccgaacgccaaccccaacgccaaccccaacgcgaaccccaacgccaacccgaacgccaaccccaacguggaccccaacgccaaccccaacgccaacccgaacgcgaaccccaacgccaaccccaacgccaacccgaacgccaaccccaacgccaaccccaacgcgaaccccaacgccaacccgaacgccaaccccaacgccaaccccaacgcgaaccccaacgccaacccgaacgccaaccccaacgccaaccccaacgccaaccccaacgcgaacccgaacgccaaccccaacaagaacaaccagggcaacggccaggggcacaacaugcccaacgaccccaaccgcaacgucgacgagaacgccaacgccaacuccgccgugaagaacaacaacaacgaggagccgagcgacaagcacaucaaggaguaccugaacaagauccagaacucccucagcacggaguggucccccugcagcgugaccugcggcaacgggauccagguccggaucaagcccggcuccgcgaacaagcccaaggacgagcuggacuacgccaacgacaucgagaagaagaucugcaagauggagaagugcagcuccguguucaacguggucaacagcuccaucgggcugaucauggugcucagcuuccuguuccugaacugaggacuaguuauaagacugacuagcccgaugggccucccaacgggcccuccuccccuccuugcaccgagauuaaucaaaggcucuuuucagagccaccaaaaaaaaaaaaaaaaaaaaaaaaaaaaaaaaaaaaaaaaaaaaaaaaaaaaaaaaaaaaaaaaaaaaaaaaaaaaaaaaaaaaaaaaaaaaaaaaaaaaagaauu

SEQ ID NO: 9673 - RNA, 1412 nt, Artificial Sequence
  mRNA Design i-3 (hSL-A100-N5) comprising derived and/or modified sequence from Pf(3D7)__XP_001351122.1__HsALB_Pf-CSP(19-397) (opt1)
aggagaaagcuuaccaugaagugggugaccuucaucagccuccuguuccuguucuccagcgccuacucccuguuccaggaguaccagugcuacggcuccagcuccaacacccgggugcucaacgagcugaacuacgacaacgcggggaccaaccuguacaacgagcucgagaugaacuacuacggcaagcaggagaacugguacagccugaagaagaacucccgcagccugggggagaacgacgacggcaacaacgaggacaacgagaagcuccggaagcccaagcacaagaagcugaagcagccggccgacgggaaccccgaccccaacgccaaccccaacguggacccgaacgccaaccccaacgucgaccccaacgccaaccccaacguggacccgaacgcgaaccccaacgccaaccccaacgccaaccccaacgccaacccgaacgcgaaccccaacgccaaccccaacgccaaccccaacgccaacccgaacgccaaccccaacgcgaaccccaacgccaaccccaacgccaacccgaacgccaaccccaacgccaaccccaacgcgaaccccaacgccaacccgaacgccaaccccaacguggaccccaacgccaaccccaacgccaacccgaacgcgaaccccaacgccaaccccaacgccaacccgaacgccaaccccaacgccaaccccaacgcgaaccccaacgccaacccgaacgccaaccccaacgccaaccccaacgcgaaccccaacgccaacccgaacgccaaccccaacgccaaccccaacgccaaccccaacgcgaacccgaacgccaaccccaacaagaacaaccagggcaacggccaggggcacaacaugcccaacgaccccaaccgcaacgucgacgagaacgccaacgccaacuccgccgugaagaacaacaacaacgaggagccgagcgacaagcacaucaaggaguaccugaacaagauccagaacucccucagcacggaguggucccccugcagcgugaccugcggcaacgggauccagguccggaucaagcccggcuccgcgaacaagcccaaggacgagcuggacuacgccaacgacaucgagaagaagaucugcaagauggagaagugcagcuccguguucaacguggucaacagcuccaucgggcugaucauggugcucagcuuccuguuccugaacugaggacuaguuauaagacugacuagcccgaugggccucccaacgggcccuccuccccuccuugcaccgagauuaaucaaaggcucuuuucagagccaccaaaaaaaaaaaaaaaaaaaaaaaaaaaaaaaaaaaaaaaaaaaaaaaaaaaaaaaaaaaaaaaaaaaaaaaaaaaaaaaaaaaaaaaaaaaaaaaaaaaaagaauu

SEQ ID NO: 9674 - RNA, 1727 nt, Artificial Sequence
  mRNA Design i-3 (hSL-A100-N5) comprising derived and/or modified sequence from Pf(3D7)__XP_001351122.1__HsALB_Pf-CSP(19-272)_L(PVTN)_HBsAg (opt1)
aggagaaagcuuaccaugaagugggugaccuucaucagccugcucuuccuguucuccagcgccuacucccuguuccaggaguaccagugcuacggcuccagcuccaacacccgggugcucaacgagcugaacuacgacaacgcggggaccaaccuguacaacgagcucgagaugaacuacuacggcaagcaggagaacugguacagccugaagaagaacucccgcagccugggggagaacgacgacggcaacaacgaggacaacgagaagcuccggaagcccaagcacaagaagcugaagcagccggccgacgggaaccccgaccccaacgccaaccccaacguggacccgaacgccaaccccaacgucgaccccaacgccaaccccaacguggacccgaacgcgaaccccaacgccaaccccaacgccaaccccaacgccaacccgaacgcgaaccccaacgccaaccccaacgccaaccccaacgccaacccgaacgccaaccccaacgcgaaccccaacgccaaccccaacgccaacccgaacgccaaccccaacgccaaccccaacgcgaaccccaacgccaacccgaacgccaaccccaacguggaccccaacgccaaccccaacgccaacccgaacgcgaaccccaacgccaaccccaacgccaacccgaacgccaaccccaacgccaaccccaacgcgaaccccaacgccaacccgaacgccaaccccaacgccaaccccaacgcgaaccccaacgccaacccgaacgccaaccccaacgccaaccccaacgccaaccccaacgcgaacccgaacgccaaccccccggugacgaacauggagaacaucaccagcggcuuccuggggccccuccuggugcugcaggccggcuucuuccuccugacccgcauccugaccaucccgcagucccucgacagcugguggaccucccugaacuuccucgggggcagccccgucugccuggggcagaacucccagagccccaccuccaaccacagccccaccuccugcccgcccaucugccccggcuaccgguggaugugccugcgccgguucaucaucuuccuguucauccuccugcugugccucaucuuccugcuggugcuccuggacuaccagggcaugcugcccgugugcccgcucauccccgggagcacgaccaccaacaccggccccugcaagacgugcaccacccccgcccaggggaacuccauguucccgagcugcugcugcaccaagcccacggacggcaacugcacgugcauccccauccccuccagcugggcguucgccaaguaccugugggagugggccuccguccgcuucagcuggcugucccuccuggugccguucgugcagugguucgucgggcugagccccaccguguggcucuccgccaucuggaugaugugguacuggggccccagccuguacagcaucgugucccccuucaucccgcugcuccccaucuucuucugccugugggucuacaucugaggacuaguuauaagacugacuagcccgaugggccucccaacgggcccuccuccccuccuugcaccgagauuaaucaaaggcucuuuucagagccaccaaaaaaaaaaaaaaaaaaaaaaaaaaaaaaaaaaaaaaaaaaaaaaaaaaaaaaaaaaaaaaaaaaaaaaaaaaaaaaaaaaaaaaaaaaaaaaaaaaaaagaauu

SEQ ID NO: 9675 - RNA, 1844 nt, Artificial Sequence
  mRNA Design i-3 (hSL-A100-N5) comprising derived and/or modified sequence from Pf(3D7)__XP_001351122.1__HsALB_Pf-CSP(19-272)_L(AAY)_Pf-CSP(346-3 65)_L(AAY)_PADRE_L(PVTN)_HBsAg (opt1)
aggagaaagcuuaccaugaagugggugaccuucaucagccugcucuuccuguucuccagcgccuacucccuguuccaggaguaccagugcuacggcuccagcuccaacacccgggugcucaacgagcugaacuacgacaacgcggggaccaaccuguacaacgagcucgagaugaacuacuacggcaagcaggagaacugguacagccugaagaagaacucccgcagccugggggagaacgacgacggcaacaacgaggacaacgagaagcuccggaagcccaagcacaagaagcugaagcagccggccgacgggaaccccgaccccaacgccaaccccaacguggacccgaacgccaaccccaacgucgaccccaacgccaaccccaacguggacccgaacgcgaaccccaacgccaaccccaacgccaaccccaacgccaacccgaacgcgaaccccaacgccaaccccaacgccaaccccaacgccaacccgaacgccaaccccaacgcgaaccccaacgccaaccccaacgccaacccgaacgccaaccccaacgccaaccccaacgcgaaccccaacgccaacccgaacgccaaccccaacguggaccccaacgccaaccccaacgccaacccgaacgcgaaccccaacgccaaccccaacgccaacccgaacgccaaccccaacgccaaccccaacgcgaaccccaacgccaacccgaacgccaaccccaacgccaaccccaacgcgaaccccaacgccaacccgaacgccaaccccaacgccaaccccaacgccaaccccaacgcgaacccgaacgccaaccccgccgcguauaucaagcccggcuccgcgaacaagcccaaggacgagcuggacuacgccaacgacaucgaggcggccuacgccaaguucguggccgccuggacccugaaggcggccgccccggugacgaacauggagaacaucaccagcggcuuccuggggccccuccuggugcugcaggccggcuucuuccuccugacccgcauccugaccaucccgcagucccucgacagcugguggaccucccugaacuuccucgggggcagccccgucugccuggggcagaacucccagagccccaccuccaaccacagccccaccuccugcccgcccaucugccccggcuaccgguggaugugccugcgccgguucaucaucuuccuguucauccuccugcugugccucaucuuccugcuggugcuccuggacuaccagggcaugcugcccgugugcccgcucauccccgggagcacgaccaccaacaccggccccugcaagacgugcaccacccccgcccaggggaacuccauguucccgagcugcugcugcaccaagcccacggacggcaacugcacgugcauccccauccccuccagcugggcguucgccaaguaccugugggagugggccuccguccgcuucagcuggcugucccuccuggugccguucgugcagugguucgucgggcugagccccaccguguggcucuccgccaucuggaugaugugguacuggggccccagccuguacagcaucgugucccccuucaucccgcugcuccccaucuucuucugccugugggucuacaucugaggacuaguuauaagacugacuagcccgaugggccucccaacgggcccuccuccccuccuugcaccgagauuaaucaaaggcucuuuucagagccaccaaaaaaaaaaaaaaaaaaaaaaaaaaaaaaaaaaaaaaaaaaaaaaaaaaaaaaaaaaaaaaaaaaaaaaaaaaaaaaaaaaaaaaaaaaaaaaaaaaaaagaauu

SEQ ID NO: 9676 - RNA, 1844 nt, Artificial Sequence
  mRNA Design i-3 (hSL-A100-N5) comprising derived and/or modified sequence from Pf(3D7)__XP_001351122.1__HsALB_Pf-CSP(19-272)_L(AAY)_Pf-CSP(346-3 65)_L(AAY)_PADRE_L(PVTN)_HBsAg (opt1)
aggagaaagcuuaccaugaagugggugaccuucaucagccuccuguuccuguucuccagcgccuacucccuguuccaggaguaccagugcuacggcuccagcuccaacacccgggugcucaacgagcugaacuacgacaacgcggggaccaaccuguacaacgagcucgagaugaacuacuacggcaagcaggagaacugguacagccugaagaagaacucccgcagccugggggagaacgacgacggcaacaacgaggacaacgagaagcuccggaagcccaagcacaagaagcugaagcagccggccgacgggaaccccgaccccaacgccaaccccaacguggacccgaacgccaaccccaacgucgaccccaacgccaaccccaacguggacccgaacgcgaaccccaacgccaaccccaacgccaaccccaacgccaacccgaacgcgaaccccaacgccaaccccaacgccaaccccaacgccaacccgaacgccaaccccaacgcgaaccccaacgccaaccccaacgccaacccgaacgccaaccccaacgccaaccccaacgcgaaccccaacgccaacccgaacgccaaccccaacguggaccccaacgccaaccccaacgccaacccgaacgcgaaccccaacgccaaccccaacgccaacccgaacgccaaccccaacgccaaccccaacgcgaaccccaacgccaacccgaacgccaaccccaacgccaaccccaacgcgaaccccaacgccaacccgaacgccaaccccaacgccaaccccaacgccaaccccaacgcgaacccgaacgccaaccccgccgcguauaucaagcccggcuccgcgaacaagcccaaggacgagcuggacuacgccaacgacaucgaggcggccuacgccaaguucguggccgccuggacccugaaggcggccgccccggugacgaacauggagaacaucaccagcggcuuccuggggccccuccuggugcugcaggccggcuucuuccuccugacccgcauccugaccaucccgcagucccucgacagcugguggaccucccugaacuuccucgggggcagccccgucugccuggggcagaacucccagagccccaccuccaaccacagccccaccuccugcccgcccaucugccccggcuaccgguggaugugccugcgccgguucaucaucuuccuguucauccuccugcugugccucaucuuccugcuggugcuccuggacuaccagggcaugcugcccgugugcccgcucauccccgggagcacgaccaccaacaccggccccugcaagacgugcaccacccccgcccaggggaacuccauguucccgagcugcugcugcaccaagcccacggacggcaacugcacgugcauccccauccccuccagcugggcguucgccaaguaccugugggagugggccuccguccgcuucagcuggcugucccuccuggugccguucgugcagugguucgucgggcugagccccaccguguggcucuccgccaucuggaugaugugguacuggggccccagccuguacagcaucgugucccccuucaucccgcugcuccccaucuucuucugccugugggucuacaucugaggacuaguuauaagacugacuagcccgaugggccucccaacgggcccuccuccccuccuugcaccgagauuaaucaaaggcucuuuucagagccaccaaaaaaaaaaaaaaaaaaaaaaaaaaaaaaaaaaaaaaaaaaaaaaaaaaaaaaaaaaaaaaaaaaaaaaaaaaaaaaaaaaaaaaaaaaaaaaaaaaaaagaauu

SEQ ID NO: 9677 - RNA, 2063 nt, Artificial Sequence
  mRNA Design i-3 (hSL-A100-N5) comprising derived and/or modified sequence from Pf(3D7)__XP_001351122.1__HsALB_Pf-CSP(19-384)_L(PVTN)_HBsAg (opt1)
aggagaaagcuuaccaugaagugggugaccuucaucagccugcucuuccuguucuccagcgccuacucccuguuccaggaguaccagugcuacggcuccagcuccaacacccgggugcucaacgagcugaacuacgacaacgcggggaccaaccuguacaacgagcucgagaugaacuacuacggcaagcaggagaacugguacagccugaagaagaacucccgcagccugggggagaacgacgacggcaacaacgaggacaacgagaagcuccggaagcccaagcacaagaagcugaagcagccggccgacgggaaccccgaccccaacgccaaccccaacguggacccgaacgccaaccccaacgucgaccccaacgccaaccccaacguggacccgaacgcgaaccccaacgccaaccccaacgccaaccccaacgccaacccgaacgcgaaccccaacgccaaccccaacgccaaccccaacgccaacccgaacgccaaccccaacgcgaaccccaacgccaaccccaacgccaacccgaacgccaaccccaacgccaaccccaacgcgaaccccaacgccaacccgaacgccaaccccaacguggaccccaacgccaaccccaacgccaacccgaacgcgaaccccaacgccaaccccaacgccaacccgaacgccaaccccaacgccaaccccaacgcgaaccccaacgccaacccgaacgccaaccccaacgccaaccccaacgcgaaccccaacgccaacccgaacgccaaccccaacgccaaccccaacgccaaccccaacgcgaacccgaacgccaaccccaacaagaacaaccagggcaacggccaggggcacaacaugcccaacgaccccaaccgcaacgucgacgagaacgccaacgccaacuccgccgugaagaacaacaacaacgaggagccgagcgacaagcacaucaaggaguaccugaacaagauccagaacucccucagcacggaguggucccccugcagcgugaccugcggcaacgggauccagguccggaucaagcccggcuccgcgaacaagcccaaggacgagcuggacuacgccaacgacaucgagaagaagaucugcaagauggagaagugcagcuccguguucaacguggucaacagcuccccggugacgaacauggagaacaucaccagcggcuuccuggggccccuccuggugcugcaggccggcuucuuccuccugacccgcauccugaccaucccgcagucccucgacagcugguggaccucccugaacuuccucgggggcagccccgucugccuggggcagaacucccagagccccaccuccaaccacagccccaccuccugcccgcccaucugccccggcuaccgguggaugugccugcgccgguucaucaucuuccuguucauccuccugcugugccucaucuuccugcuggugcuccuggacuaccagggcaugcugcccgugugcccgcucauccccgggagcacgaccaccaacaccggccccugcaagacgugcaccacccccgcccaggggaacuccauguucccgagcugcugcugcaccaagcccacggacggcaacugcacgugcauccccauccccuccagcugggcguucgccaaguaccugugggagugggccuccguccgcuucagcuggcugucccuccuggugccguucgugcagugguucgucgggcugagccccaccguguggcucuccgccaucuggaugaugugguacuggggccccagccuguacagcaucgugucccccuucaucccgcugcuccccaucuucuucugccugugggucuacaucugaggacuaguuauaagacugacuagcccgaugggccucccaacgggcccuccuccccuccuugcaccgagauuaaucaaaggcucuuuucagagccaccaaaaaaaaaaaaaaaaaaaaaaaaaaaaaaaaaaaaaaaaaaaaaaaaaaaaaaaaaaaaaaaaaaaaaaaaaaaaaaaaaaaaaaaaaaaaaaaaaaaaagaauu

SEQ ID NO: 9678 - RNA, 2063 nt, Artificial Sequence
  mRNA Design i-3 (hSL-A100-N5) comprising derived and/or modified sequence from Pf(3D7)__XP_001351122.1__HsALB_Pf-CSP(19-384)_L(PVTN)_HBsAg (opt1)
aggagaaagcuuaccaugaagugggugaccuucaucagccuccuguuccuguucuccagcgccuacucccuguuccaggaguaccagugcuacggcuccagcuccaacacccgggugcucaacgagcugaacuacgacaacgcggggaccaaccuguacaacgagcucgagaugaacuacuacggcaagcaggagaacugguacagccugaagaagaacucccgcagccugggggagaacgacgacggcaacaacgaggacaacgagaagcuccggaagcccaagcacaagaagcugaagcagccggccgacgggaaccccgaccccaacgccaaccccaacguggacccgaacgccaaccccaacgucgaccccaacgccaaccccaacguggacccgaacgcgaaccccaacgccaaccccaacgccaaccccaacgccaacccgaacgcgaaccccaacgccaaccccaacgccaaccccaacgccaacccgaacgccaaccccaacgcgaaccccaacgccaaccccaacgccaacccgaacgccaaccccaacgccaaccccaacgcgaaccccaacgccaacccgaacgccaaccccaacguggaccccaacgccaaccccaacgccaacccgaacgcgaaccccaacgccaaccccaacgccaacccgaacgccaaccccaacgccaaccccaacgcgaaccccaacgccaacccgaacgccaaccccaacgccaaccccaacgcgaaccccaacgccaacccgaacgccaaccccaacgccaaccccaacgccaaccccaacgcgaacccgaacgccaaccccaacaagaacaaccagggcaacggccaggggcacaacaugcccaacgaccccaaccgcaacgucgacgagaacgccaacgccaacuccgccgugaagaacaacaacaacgaggagccgagcgacaagcacaucaaggaguaccugaacaagauccagaacucccucagcacggaguggucccccugcagcgugaccugcggcaacgggauccagguccggaucaagcccggcuccgcgaacaagcccaaggacgagcuggacuacgccaacgacaucgagaagaagaucugcaagauggagaagugcagcuccguguucaacguggucaacagcuccccggugacgaacauggagaacaucaccagcggcuuccuggggccccuccuggugcugcaggccggcuucuuccuccugacccgcauccugaccaucccgcagucccucgacagcugguggaccucccugaacuuccucgggggcagccccgucugccuggggcagaacucccagagccccaccuccaaccacagccccaccuccugcccgcccaucugccccggcuaccgguggaugugccugcgccgguucaucaucuuccuguucauccuccugcugugccucaucuuccugcuggugcuccuggacuaccagggcaugcugcccgugugcccgcucauccccgggagcacgaccaccaacaccggccccugcaagacgugcaccacccccgcccaggggaacuccauguucccgagcugcugcugcaccaagcccacggacggcaacugcacgugcauccccauccccuccagcugggcguucgccaaguaccugugggagugggccuccguccgcuucagcuggcugucccuccuggugccguucgugcagugguucgucgggcugagccccaccguguggcucuccgccaucuggaugaugugguacuggggccccagccuguacagcaucgugucccccuucaucccgcugcuccccaucuucuucugccugugggucuacaucugaggacuaguuauaagacugacuagcccgaugggccucccaacgggcccuccuccccuccuugcaccgagauuaaucaaaggcucuuuucagagccaccaaaaaaaaaaaaaaaaaaaaaaaaaaaaaaaaaaaaaaaaaaaaaaaaaaaaaaaaaaaaaaaaaaaaaaaaaaaaaaaaaaaaaaaaaaaaaaaaaaaaagaauu

SEQ ID NO: 9679 - RNA, 1880 nt, Artificial Sequence
  mRNA Design i-3 (hSL-A100-N5) comprising derived and/or modified sequence from Pf(3D7)__XP_001351122.1__HsALB_Pf-CSP(19-384)_L(SGG)_Ferritin (opt1)
aggagaaagcuuaccaugaagugggugaccuucaucagccugcucuuccuguucuccagcgccuacucccuguuccaggaguaccagugcuacggcuccagcuccaacacccgggugcucaacgagcugaacuacgacaacgcggggaccaaccuguacaacgagcucgagaugaacuacuacggcaagcaggagaacugguacagccugaagaagaacucccgcagccugggggagaacgacgacggcaacaacgaggacaacgagaagcuccggaagcccaagcacaagaagcugaagcagccggccgacgggaaccccgaccccaacgccaaccccaacguggacccgaacgccaaccccaacgucgaccccaacgccaaccccaacguggacccgaacgcgaaccccaacgccaaccccaacgccaaccccaacgccaacccgaacgcgaaccccaacgccaaccccaacgccaaccccaacgccaacccgaacgccaaccccaacgcgaaccccaacgccaaccccaacgccaacccgaacgccaaccccaacgccaaccccaacgcgaaccccaacgccaacccgaacgccaaccccaacguggaccccaacgccaaccccaacgccaacccgaacgcgaaccccaacgccaaccccaacgccaacccgaacgccaaccccaacgccaaccccaacgcgaaccccaacgccaacccgaacgccaaccccaacgccaaccccaacgcgaaccccaacgccaacccgaacgccaaccccaacgccaaccccaacgccaaccccaacgcgaacccgaacgccaaccccaacaagaacaaccagggcaacggccaggggcacaacaugcccaacgaccccaaccgcaacgucgacgagaacgccaacgccaacuccgccgugaagaacaacaacaacgaggagccgagcgacaagcacaucaaggaguaccugaacaagauccagaacucccucagcacggaguggucccccugcagcgugaccugcggcaacgggauccagguccggaucaagcccggcuccgcgaacaagcccaaggacgagcuggacuacgccaacgacaucgagaagaagaucugcaagauggagaagugcagcuccguguucaacguggucaacagcuccagcggcgggcugagcaaggacaucaucaagcuccugaacgagcaggugaacaaggagaugaacuccagcaaccuguacauguccaugagcuccuggugcuacacccacagccucgacggcgccgggcuguuccuguucgaccacgccgcggaggaguacgagcacgccaagaagcucaucaucuuccugaacgagaacaacguccccgugcagcugaccuccaucagcgccccggagcacaaguucgagggccucacgcagaucuuccagaaggccuacgagcacgagcagcacaucuccgagagcaucaacaacaucguggaccacgccaucaaguccaaggaccacgcgaccuucaacuuccugcagugguacgucgccgagcagcacgaggaggaggugcuguucaaggacauccucgacaagaucgagcugaucgggaacgagaaccacggccuguaccucgccgaccaguacgugaaggggaucgccaagagccgcaaguccugaggacuaguuauaagacugacuagcccgaugggccucccaacgggcccuccuccccuccuugcaccgagauuaaucaaaggcucuuuucagagccaccaaaaaaaaaaaaaaaaaaaaaaaaaaaaaaaaaaaaaaaaaaaaaaaaaaaaaaaaaaaaaaaaaaaaaaaaaaaaaaaaaaaaaaaaaaaaaaaaaaaaagaauu

SEQ ID NO: 9680 - RNA, 1880 nt, Artificial Sequence
  mRNA Design i-3 (hSL-A100-N5) comprising derived and/or modified sequence from Pf(3D7)__XP_001351122.1__HsALB_Pf-CSP(19-384)_L(SGG)_Ferritin (opt1)
aggagaaagcuuaccaugaagugggugaccuucaucagccuccuguuccuguucuccagcgccuacucccuguuccaggaguaccagugcuacggcuccagcuccaacacccgggugcucaacgagcugaacuacgacaacgcggggaccaaccuguacaacgagcucgagaugaacuacuacggcaagcaggagaacugguacagccugaagaagaacucccgcagccugggggagaacgacgacggcaacaacgaggacaacgagaagcuccggaagcccaagcacaagaagcugaagcagccggccgacgggaaccccgaccccaacgccaaccccaacguggacccgaacgccaaccccaacgucgaccccaacgccaaccccaacguggacccgaacgcgaaccccaacgccaaccccaacgccaaccccaacgccaacccgaacgcgaaccccaacgccaaccccaacgccaaccccaacgccaacccgaacgccaaccccaacgcgaaccccaacgccaaccccaacgccaacccgaacgccaaccccaacgccaaccccaacgcgaaccccaacgccaacccgaacgccaaccccaacguggaccccaacgccaaccccaacgccaacccgaacgcgaaccccaacgccaaccccaacgccaacccgaacgccaaccccaacgccaaccccaacgcgaaccccaacgccaacccgaacgccaaccccaacgccaaccccaacgcgaaccccaacgccaacccgaacgccaaccccaacgccaaccccaacgccaaccccaacgcgaacccgaacgccaaccccaacaagaacaaccagggcaacggccaggggcacaacaugcccaacgaccccaaccgcaacgucgacgagaacgccaacgccaacuccgccgugaagaacaacaacaacgaggagccgagcgacaagcacaucaaggaguaccugaacaagauccagaacucccucagcacggaguggucccccugcagcgugaccugcggcaacgggauccagguccggaucaagcccggcuccgcgaacaagcccaaggacgagcuggacuacgccaacgacaucgagaagaagaucugcaagauggagaagugcagcuccguguucaacguggucaacagcuccagcggcgggcugagcaaggacaucaucaagcuccugaacgagcaggugaacaaggagaugaacuccagcaaccuguacauguccaugagcuccuggugcuacacccacagccucgacggcgccgggcuguuccuguucgaccacgccgcggaggaguacgagcacgccaagaagcucaucaucuuccugaacgagaacaacguccccgugcagcugaccuccaucagcgccccggagcacaaguucgagggccucacgcagaucuuccagaaggccuacgagcacgagcagcacaucuccgagagcaucaacaacaucguggaccacgccaucaaguccaaggaccacgcgaccuucaacuuccugcagugguacgucgccgagcagcacgaggaggaggugcuguucaaggacauccucgacaagaucgagcugaucgggaacgagaaccacggccuguaccucgccgaccaguacgugaaggggaucgccaagagccgcaaguccugaggacuaguuauaagacugacuagcccgaugggccucccaacgggcccuccuccccuccuugcaccgagauuaaucaaaggcucuuuucagagccaccaaaaaaaaaaaaaaaaaaaaaaaaaaaaaaaaaaaaaaaaaaaaaaaaaaaaaaaaaaaaaaaaaaaaaaaaaaaaaaaaaaaaaaaaaaaaaaaaaaaaagaauu

SEQ ID NO: 9681 - RNA, 1841 nt, Artificial Sequence
  mRNA Design i-3 (hSL-A100-N5) comprising derived and/or modified sequence from Pf(3D7)__XP_001351122.1__HsALB_Pf-CSP(93-384)_L(PVTN)_HBsAg (opt1)
aggagaaagcuuaccaugaagugggugaccuucaucagccugcucuuccuguucuccagcgccuacuccaagcugaagcagccggccgacgggaaccccgaccccaacgccaaccccaacguggacccgaacgccaaccccaacgucgaccccaacgccaaccccaacguggacccgaacgcgaaccccaacgccaaccccaacgccaaccccaacgccaacccgaacgcgaaccccaacgccaaccccaacgccaaccccaacgccaacccgaacgccaaccccaacgcgaaccccaacgccaaccccaacgccaacccgaacgccaaccccaacgccaaccccaacgcgaaccccaacgccaacccgaacgccaaccccaacguggaccccaacgccaaccccaacgccaacccgaacgcgaaccccaacgccaaccccaacgccaacccgaacgccaaccccaacgccaaccccaacgcgaaccccaacgccaacccgaacgccaaccccaacgccaaccccaacgcgaaccccaacgccaacccgaacgccaaccccaacgccaaccccaacgccaaccccaacgcgaacccgaacgccaaccccaacaagaacaaccagggcaacggccaggggcacaacaugcccaacgaccccaaccgcaacgucgacgagaacgccaacgccaacuccgccgugaagaacaacaacaacgaggagccgagcgacaagcacaucaaggaguaccugaacaagauccagaacucccucagcacggaguggucccccugcagcgugaccugcggcaacgggauccagguccggaucaagcccggcuccgcgaacaagcccaaggacgagcuggacuacgccaacgacaucgagaagaagaucugcaagauggagaagugcagcuccguguucaacguggucaacagcuccccggugacgaacauggagaacaucaccagcggcuuccuggggccccuccuggugcugcaggccggcuucuuccuccugacccgcauccugaccaucccgcagucccucgacagcugguggaccucccugaacuuccucgggggcagccccgucugccuggggcagaacucccagagccccaccuccaaccacagccccaccuccugcccgcccaucugccccggcuaccgguggaugugccugcgccgguucaucaucuuccuguucauccuccugcugugccucaucuuccugcuggugcuccuggacuaccagggcaugcugcccgugugcccgcucauccccgggagcacgaccaccaacaccggccccugcaagacgugcaccacccccgcccaggggaacuccauguucccgagcugcugcugcaccaagcccacggacggcaacugcacgugcauccccauccccuccagcugggcguucgccaaguaccugugggagugggccuccguccgcuucagcuggcugucccuccuggugccguucgugcagugguucgucgggcugagccccaccguguggcucuccgccaucuggaugaugugguacuggggccccagccuguacagcaucgugucccccuucaucccgcugcuccccaucuucuucugccugugggucuacaucugaggacuaguuauaagacugacuagcccgaugggccucccaacgggcccuccuccccuccuugcaccgagauuaaucaaaggcucuuuucagagccaccaaaaaaaaaaaaaaaaaaaaaaaaaaaaaaaaaaaaaaaaaaaaaaaaaaaaaaaaaaaaaaaaaaaaaaaaaaaaaaaaaaaaaaaaaaaaaaaaaaaaagaauu

SEQ ID NO: 9682 - RNA, 1841 nt, Artificial Sequence
  mRNA Design i-3 (hSL-A100-N5) comprising derived and/or modified sequence from Pf(3D7)__XP_001351122.1__HsALB_Pf-CSP(93-384)_L(PVTN)_HBsAg (opt1)
aggagaaagcuuaccaugaagugggugaccuucaucagccuccuguuccuguucuccagcgccuacuccaagcugaagcagccggccgacgggaaccccgaccccaacgccaaccccaacguggacccgaacgccaaccccaacgucgaccccaacgccaaccccaacguggacccgaacgcgaaccccaacgccaaccccaacgccaaccccaacgccaacccgaacgcgaaccccaacgccaaccccaacgccaaccccaacgccaacccgaacgccaaccccaacgcgaaccccaacgccaaccccaacgccaacccgaacgccaaccccaacgccaaccccaacgcgaaccccaacgccaacccgaacgccaaccccaacguggaccccaacgccaaccccaacgccaacccgaacgcgaaccccaacgccaaccccaacgccaacccgaacgccaaccccaacgccaaccccaacgcgaaccccaacgccaacccgaacgccaaccccaacgccaaccccaacgcgaaccccaacgccaacccgaacgccaaccccaacgccaaccccaacgccaaccccaacgcgaacccgaacgccaaccccaacaagaacaaccagggcaacggccaggggcacaacaugcccaacgaccccaaccgcaacgucgacgagaacgccaacgccaacuccgccgugaagaacaacaacaacgaggagccgagcgacaagcacaucaaggaguaccugaacaagauccagaacucccucagcacggaguggucccccugcagcgugaccugcggcaacgggauccagguccggaucaagcccggcuccgcgaacaagcccaaggacgagcuggacuacgccaacgacaucgagaagaagaucugcaagauggagaagugcagcuccguguucaacguggucaacagcuccccggugacgaacauggagaacaucaccagcggcuuccuggggccccuccuggugcugcaggccggcuucuuccuccugacccgcauccugaccaucccgcagucccucgacagcugguggaccucccugaacuuccucgggggcagccccgucugccuggggcagaacucccagagccccaccuccaaccacagccccaccuccugcccgcccaucugccccggcuaccgguggaugugccugcgccgguucaucaucuuccuguucauccuccugcugugccucaucuuccugcuggugcuccuggacuaccagggcaugcugcccgugugcccgcucauccccgggagcacgaccaccaacaccggccccugcaagacgugcaccacccccgcccaggggaacuccauguucccgagcugcugcugcaccaagcccacggacggcaacugcacgugcauccccauccccuccagcugggcguucgccaaguaccugugggagugggccuccguccgcuucagcuggcugucccuccuggugccguucgugcagugguucgucgggcugagccccaccguguggcucuccgccaucuggaugaugugguacuggggccccagccuguacagcaucgugucccccuucaucccgcugcuccccaucuucuucugccugugggucuacaucugaggacuaguuauaagacugacuagcccgaugggccucccaacgggcccuccuccccuccuugcaccgagauuaaucaaaggcucuuuucagagccaccaaaaaaaaaaaaaaaaaaaaaaaaaaaaaaaaaaaaaaaaaaaaaaaaaaaaaaaaaaaaaaaaaaaaaaaaaaaaaaaaaaaaaaaaaaaaaaaaaaaaagaauu

SEQ ID NO: 9683 - RNA, 1502 nt, Artificial Sequence; identical to SEQ ID NO: 7802
  mRNA Design i-3 (hSL-A100-N5) comprising derived and/or modified sequence from Pf(3D7)__XP_001351122.1__HsALB_Pf-CSP(199-377)_L(PVTN)_HBsAg (opt1)

SEQ ID NO: 9684 - RNA, 1199 nt, Artificial Sequence
  mRNA Design i-3 (hSL-A100-N5) comprising derived and/or modified sequence from Pf(3D7)__XP_001351122.1__HsALB_Pf-CSP(19-272)_L(AAY)_Pf-CSP(310-3 27)_L(AAY)_Pf-CSP(346-375) (opt1)
aggagaaagcuuaccaugaagugggugaccuucaucagccuccuguuccuguucuccagcgccuacucccuguuccaggaguaccagugcuacggcuccagcuccaacacccgggugcucaacgagcugaacuacgacaacgcggggaccaaccuguacaacgagcucgagaugaacuacuacggcaagcaggagaacugguacagccugaagaagaacucccgcagccugggggagaacgacgacggcaacaacgaggacaacgagaagcuccggaagcccaagcacaagaagcugaagcagccggccgacgggaaccccgaccccaacgccaaccccaacguggacccgaacgccaaccccaacgucgaccccaacgccaaccccaacguggacccgaacgcgaaccccaacgccaaccccaacgccaaccccaacgccaacccgaacgcgaaccccaacgccaaccccaacgccaaccccaacgccaacccgaacgccaaccccaacgcgaaccccaacgccaaccccaacgccaacccgaacgccaaccccaacgccaaccccaacgcgaaccccaacgccaacccgaacgccaaccccaacguggaccccaacgccaaccccaacgccaacccgaacgcgaaccccaacgccaaccccaacgccaacccgaacgccaaccccaacgccaaccccaacgcgaaccccaacgccaacccgaacgccaaccccaacgccaaccccaacgcgaaccccaacgccaacccgaacgccaaccccaacgccaaccccaacgccaaccccaacgcgaacccgaacgccaaccccgccgcguaugagccgagcgacaagcacaucaaggaguaccugaacaagauccagaacucccucgcggccuacaucaagcccggcuccgcgaacaagcccaaggacgagcuggacuacgccaacgacaucgagaagaagaucugcaagauggagaagugcagcugaggacuaguuauaagacugacuagcccgaugggccucccaacgggcccuccuccccuccuugcaccgagauuaaucaaaggcucuuuucagagccaccaaaaaaaaaaaaaaaaaaaaaaaaaaaaaaaaaaaaaaaaaaaaaaaaaaaaaaaaaaaaaaaaaaaaaaaaaaaaaaaaaaaaaaaaaaaaaaaaaaaaagaauu

SEQ ID NO: 9685 - RNA, 1199 nt, Artificial Sequence
  mRNA Design i-3 (hSL-A100-N5) comprising derived and/or modified sequence from Pf(3D7)__XP_001351122.1__HsALB_Pf-CSP(19-272)_L(AAY)_Pf-CSP(346-3 75)_L(AAY)_Pf-CSP(310-327) (opt1)
aggagaaagcuuaccaugaagugggugaccuucaucagccuccuguuccuguucuccagcgccuacucccuguuccaggaguaccagugcuacggcuccagcuccaacacccgggugcucaacgagcugaacuacgacaacgcggggaccaaccuguacaacgagcucgagaugaacuacuacggcaagcaggagaacugguacagccugaagaagaacucccgcagccugggggagaacgacgacggcaacaacgaggacaacgagaagcuccggaagcccaagcacaagaagcugaagcagccggccgacgggaaccccgaccccaacgccaaccccaacguggacccgaacgccaaccccaacgucgaccccaacgccaaccccaacguggacccgaacgcgaaccccaacgccaaccccaacgccaaccccaacgccaacccgaacgcgaaccccaacgccaaccccaacgccaaccccaacgccaacccgaacgccaaccccaacgcgaaccccaacgccaaccccaacgccaacccgaacgccaaccccaacgccaaccccaacgcgaaccccaacgccaacccgaacgccaaccccaacguggaccccaacgccaaccccaacgccaacccgaacgcgaaccccaacgccaaccccaacgccaacccgaacgccaaccccaacgccaaccccaacgcgaaccccaacgccaacccgaacgccaaccccaacgccaaccccaacgcgaaccccaacgccaacccgaacgccaaccccaacgccaaccccaacgccaaccccaacgcgaacccgaacgccaaccccgcggccuacaucaagcccggcuccgcgaacaagcccaaggacgagcuggacuacgccaacgacaucgagaagaagaucugcaagauggagaagugcagcgccgcguaugagccgagcgacaagcacaucaaggaguaccugaacaagauccagaacucccucugaggacuaguuauaagacugacuagcccgaugggccucccaacgggcccuccuccccuccuugcaccgagauuaaucaaaggcucuuuucagagccaccaaaaaaaaaaaaaaaaaaaaaaaaaaaaaaaaaaaaaaaaaaaaaaaaaaaaaaaaaaaaaaaaaaaaaaaaaaaaaaaaaaaaaaaaaaaaaaaaaaaaagaauu

SEQ ID NO: 9686 - RNA, 1247 nt, Artificial Sequence
  mRNA Design i-3 (hSL-A100-N5) comprising derived and/or modified sequence from Pf(3D7)__XP_001351122.1__HsALB_Pf-CSP(19-272)_L(AAY)_Pf-CSP(346-3 75)_L(AAY)_Pf-CSP(310-327)_L(AAY)_PADRE (opt1)
aggagaaagcuuaccaugaagugggugaccuucaucagccuccuguuccuguucuccagcgccuacucccuguuccaggaguaccagugcuacggcuccagcuccaacacccgggugcucaacgagcugaacuacgacaacgcggggaccaaccuguacaacgagcucgagaugaacuacuacggcaagcaggagaacugguacagccugaagaagaacucccgcagccugggggagaacgacgacggcaacaacgaggacaacgagaagcuccggaagcccaagcacaagaagcugaagcagccggccgacgggaaccccgaccccaacgccaaccccaacguggacccgaacgccaaccccaacgucgaccccaacgccaaccccaacguggacccgaacgcgaaccccaacgccaaccccaacgccaaccccaacgccaacccgaacgcgaaccccaacgccaaccccaacgccaaccccaacgccaacccgaacgccaaccccaacgcgaaccccaacgccaaccccaacgccaacccgaacgccaaccccaacgccaaccccaacgcgaaccccaacgccaacccgaacgccaaccccaacguggaccccaacgccaaccccaacgccaacccgaacgcgaaccccaacgccaaccccaacgccaacccgaacgccaaccccaacgccaaccccaacgcgaaccccaacgccaacccgaacgccaaccccaacgccaaccccaacgcgaaccccaacgccaacccgaacgccaaccccaacgccaaccccaacgccaaccccaacgcgaacccgaacgccaaccccgccgcguauaucaagcccggcuccgcgaacaagcccaaggacgagcuggacuacgccaacgacaucgagaagaagaucugcaagauggagaagugcagcgcggccuacgagccgagcgacaagcacaucaaggaguaccugaacaagauccagaacucccucgccgccuacgccaaguucguggccgccuggacccugaaggcggccgccugaggacuaguuauaagacugacuagcccgaugggccucccaacgggcccuccuccccuccuugcaccgagauuaaucaaaggcucuuuucagagccaccaaaaaaaaaaaaaaaaaaaaaaaaaaaaaaaaaaaaaaaaaaaaaaaaaaaaaaaaaaaaaaaaaaaaaaaaaaaaaaaaaaaaaaaaaaaaaaaaaaaaagaauu

SEQ ID NO: 9687 - RNA, 1247 nt, Artificial Sequence
  mRNA Design i-3 (hSL-A100-N5) comprising derived and/or modified sequence from Pf(3D7)__XP_001351122.1__HsALB_Pf-CSP(19-272)_L(AAY)_Pf-CSP(310-3 27)_L(AAY)_Pf-CSP(346-375)_L(AAY)_PADRE (opt1)
aggagaaagcuuaccaugaagugggugaccuucaucagccuccuguuccuguucuccagcgccuacucccuguuccaggaguaccagugcuacggcuccagcuccaacacccgggugcucaacgagcugaacuacgacaacgcggggaccaaccuguacaacgagcucgagaugaacuacuacggcaagcaggagaacugguacagccugaagaagaacucccgcagccugggggagaacgacgacggcaacaacgaggacaacgagaagcuccggaagcccaagcacaagaagcugaagcagccggccgacgggaaccccgaccccaacgccaaccccaacguggacccgaacgccaaccccaacgucgaccccaacgccaaccccaacguggacccgaacgcgaaccccaacgccaaccccaacgccaaccccaacgccaacccgaacgcgaaccccaacgccaaccccaacgccaaccccaacgccaacccgaacgccaaccccaacgcgaaccccaacgccaaccccaacgccaacccgaacgccaaccccaacgccaaccccaacgcgaaccccaacgccaacccgaacgccaaccccaacguggaccccaacgccaaccccaacgccaacccgaacgcgaaccccaacgccaaccccaacgccaacccgaacgccaaccccaacgccaaccccaacgcgaaccccaacgccaacccgaacgccaaccccaacgccaaccccaacgcgaaccccaacgccaacccgaacgccaaccccaacgccaaccccaacgccaaccccaacgcgaacccgaacgccaaccccgccgcguaugagccgagcgacaagcacaucaaggaguaccugaacaagauccagaacucccucgcggccuacaucaagcccggcuccgcgaacaagcccaaggacgagcuggacuacgccaacgacaucgagaagaagaucugcaagauggagaagugcagcgccgccuacgccaaguucguggccgccuggacccugaaggcggccgccugaggacuaguuauaagacugacuagcccgaugggccucccaacgggcccuccuccccuccuugcaccgagauuaaucaaaggcucuuuucagagccaccaaaaaaaaaaaaaaaaaaaaaaaaaaaaaaaaaaaaaaaaaaaaaaaaaaaaaaaaaaaaaaaaaaaaaaaaaaaaaaaaaaaaaaaaaaaaaaaaaaaaagaauu

SEQ ID NO: 9688 - RNA, 1301 nt, Artificial Sequence
  mRNA Design i-3 (hSL-A100-N5) comprising derived and/or modified sequence from Pf(3D7)__XP_001351122.1__HsALB_Pf-CSP(19-272)_L(AAY)_Pf-CSP(310-3 27)_L(AAY)_Pf-CSP(346-375)_L(AAY)_PADRE_L(AAY)_P2 (opt1)
aggagaaagcuuaccaugaagugggugaccuucaucagccuccuguuccuguucuccagcgccuacucccuguuccaggaguaccagugcuacggcuccagcuccaacacccgggugcucaacgagcugaacuacgacaacgcggggaccaaccuguacaacgagcucgagaugaacuacuacggcaagcaggagaacugguacagccugaagaagaacucccgcagccugggggagaacgacgacggcaacaacgaggacaacgagaagcuccggaagcccaagcacaagaagcugaagcagccggccgacgggaaccccgaccccaacgccaaccccaacguggacccgaacgccaaccccaacgucgaccccaacgccaaccccaacguggacccgaacgcgaaccccaacgccaaccccaacgccaaccccaacgccaacccgaacgcgaaccccaacgccaaccccaacgccaaccccaacgccaacccgaacgccaaccccaacgcgaaccccaacgccaaccccaacgccaacccgaacgccaaccccaacgccaaccccaacgcgaaccccaacgccaacccgaacgccaaccccaacguggaccccaacgccaaccccaacgccaacccgaacgcgaaccccaacgccaaccccaacgccaacccgaacgccaaccccaacgccaaccccaacgcgaaccccaacgccaacccgaacgccaaccccaacgccaaccccaacgcgaaccccaacgccaacccgaacgccaaccccaacgccaaccccaacgccaaccccaacgcgaacccgaacgccaaccccgcggccuacgagccgagcgacaagcacaucaaggaguaccugaacaagauccagaacucccucgccgcguauaucaagcccggcuccgcgaacaagcccaaggacgagcuggacuacgccaacgacaucgagaagaagaucugcaagauggagaagugcagcgccgccuacgccaaguucguggccgccuggacccugaaggcggccgccgccgcuuaccaguacaucaaggccaacagcaaguucaucggcaucaccgagcugugaggacuaguuauaagacugacuagcccgaugggccucccaacgggcccuccuccccuccuugcaccgagauuaaucaaaggcucuuuucagagccaccaaaaaaaaaaaaaaaaaaaaaaaaaaaaaaaaaaaaaaaaaaaaaaaaaaaaaaaaaaaaaaaaaaaaaaaaaaaaaaaaaaaaaaaaaaaaaaaaaaaaagaauu

SEQ ID NO: 9689 - RNA, 1265 nt, Artificial Sequence
  mRNA Design i-3 (hSL-A100-N5) comprising derived and/or modified sequence from Pf(3D7)__XP_001351122.1__HsALB_Pf-CSP(19-272)_L(AAY)_Pf-CSP(310-3 27)_Linker (AAY)_Pf-CSP(346-397) (opt1)
aggagaaagcuuaccaugaagugggugaccuucaucagccuccuguuccuguucuccagcgccuacucccuguuccaggaguaccagugcuacggcuccagcuccaacacccgggugcucaacgagcugaacuacgacaacgcggggaccaaccuguacaacgagcucgagaugaacuacuacggcaagcaggagaacugguacagccugaagaagaacucccgcagccugggggagaacgacgacggcaacaacgaggacaacgagaagcuccggaagcccaagcacaagaagcugaagcagccggccgacgggaaccccgaccccaacgccaaccccaacguggacccgaacgccaaccccaacgucgaccccaacgccaaccccaacguggacccgaacgcgaaccccaacgccaaccccaacgccaaccccaacgccaacccgaacgcgaaccccaacgccaaccccaacgccaaccccaacgccaacccgaacgccaaccccaacgcgaaccccaacgccaaccccaacgccaacccgaacgccaaccccaacgccaaccccaacgcgaaccccaacgccaacccgaacgccaaccccaacguggaccccaacgccaaccccaacgccaacccgaacgcgaaccccaacgccaaccccaacgccaacccgaacgccaaccccaacgccaaccccaacgcgaaccccaacgccaacccgaacgccaaccccaacgccaaccccaacgcgaaccccaacgccaacccgaacgccaaccccaacgccaaccccaacgccaaccccaacgcgaacccgaacgccaaccccgcggccuacgagccgagcgacaagcacaucaaggaguaccugaacaagauccagaacucccucgccgcguauaucaagcccggcuccgcgaacaagcccaaggacgagcuggacuacgccaacgacaucgagaagaagaucugcaagauggagaagugcagcuccguguucaacguggucaacagcuccaucgggcugaucauggugcucagcuuccuguuccugaacugaggacuaguuauaagacugacuagcccgaugggccucccaacgggcccuccuccccuccuugcaccgagauuaaucaaaggcucuuuucagagccaccaaaaaaaaaaaaaaaaaaaaaaaaaaaaaaaaaaaaaaaaaaaaaaaaaaaaaaaaaaaaaaaaaaaaaaaaaaaaaaaaaaaaaaaaaaaaaaaaaaaaagaauu

SEQ ID NO: 9690 - RNA, 1865 nt, Artificial Sequence
  mRNA Design i-3 (hSL-A100-N5) comprising derived and/or modified sequence from Pf(3D7)__XP_001351122.1__LumSynt_L(GGS4-GGG)_Pf-CSP(19-397) (opt1)
aggagaaagcuuaccaugcagaucuacgagggcaagcugaccgccgaggggcuccgcuucggcaucguggccagccgguucaaccacgcgcuggucgaccgccugguggagggggccaucgacgccaucgugcggcacggcgggcgcgaggaggacaucacccucguccgggugcccggcuccugggagaucccgguggccgccggcgagcuggcgcgcaaggaggacaucgacgccgucaucgccaucggggugcugauccggggcgccacgccccacuucgacuacaucgcgagcgagguguccaaggggcucgccgaccugagccuggagcuccgcaagcccaucaccuucggcgucaucaccgccgacacccuggagcaggccaucgagcgggccgggacgaagcacggcaacaagggcugggaggcggcccuguccgccaucgagauggccaaccucuucaagagccugcgcgggggcuccgggggcagcggcggguccggcgggagcggcgggggccuguuccaggaguaccagugcuacggcuccagcuccaacacccgggugcucaacgagcugaacuacgacaacgccgggaccaaccuguacaacgagcucgagaugaacuacuacggcaagcaggagaacugguacagccugaagaagaacucccgcagccugggggagaacgacgacggcaacaacgaggacaacgagaagcuccggaagcccaagcacaagaagcugaagcagccggcggacgggaaccccgaccccaacgccaaccccaacguggacccgaacgccaaccccaacgucgaccccaacgccaaccccaacguggacccgaacgccaaccccaacgcgaaccccaacgccaaccccaacgccaacccgaacgccaaccccaacgccaaccccaacgcgaaccccaacgccaacccgaacgccaaccccaacgccaaccccaacgcgaaccccaacgccaacccgaacgccaaccccaacgccaaccccaacgccaaccccaacgcgaacccgaacgccaaccccaacguggaccccaacgccaacccgaacgccaaccccaacgccaaccccaacgcgaaccccaacgccaacccgaacgccaaccccaacgccaaccccaacgccaaccccaacgcgaacccgaacgccaaccccaacgccaaccccaacgccaaccccaacgcgaacccgaacgccaaccccaacgccaaccccaacgccaaccccaacgccaacccgaacgcgaaccccaacaagaacaaccagggcaacggccaggggcacaacaugcccaacgaccccaaccgcaacgucgacgagaacgccaacgccaacuccgccgugaagaacaacaacaacgaggagccgagcgacaagcacaucaaggaguaccugaacaagauccagaacucccucagcaccgaguggagccccugcuccgugacgugcggcaacgggauccagguccggaucaagcccggcagcgccaacaagcccaaggacgagcuggacuacgcgaacgacaucgagaagaagaucugcaagauggagaagugcuccagcguguucaacguggucaacuccagcaucgggcugaucauggugcucuccuuccuguuccugaacugaggacuaguuauaagacugacuagcccgaugggccucccaacgggcccuccuccccuccuugcaccgagauuaaucaaaggcucuuuucagagccaccaaaaaaaaaaaaaaaaaaaaaaaaaaaaaaaaaaaaaaaaaaaaaaaaaaaaaaaaaaaaaaaaaaaaaaaaaaaaaaaaaaaaaaaaaaaaaaaaaaaaagaauu

SEQ ID NO: 9691 - RNA, 1727 nt, Artificial Sequence
  mRNA Design i-3 (hSL-A100-N5) comprising derived and/or modified sequence from Pf(3D7)__XP_001351122.1__HsALB_Pf-CSP(19-272)_L(PVTN)_HBsAg (opt1)
aggagaaagcuuaccaugaagugggugaccuucaucagccuccuguuccuguucuccagcgccuacucccuguuccaggaguaccagugcuacggcagcuccagcaacacccgcguccucaacgagcugaacuacgacaacgccgggaccaaccuguacaacgagcucgagaugaacuacuacggcaagcaggagaacugguacucccugaagaagaacagccggucccugggggagaacgacgacggcaacaacgaggacaacgagaagcuccgcaagcccaagcacaagaagcugaagcagccggcggacgggaaccccgaccccaacgccaaccccaacguggacccgaacgccaaccccaacguggaccccaacgccaaccccaacgucgacccgaacgccaaccccaacgcgaaccccaacgccaaccccaacgccaacccgaacgccaaccccaacgcgaaccccaacgccaaccccaacgccaacccgaacgccaaccccaacgccaaccccaacgcgaaccccaacgccaacccgaacgccaaccccaacgccaaccccaacgccaaccccaacgcgaacccgaacgccaaccccaacguggaccccaacgccaaccccaacgccaacccgaacgccaaccccaacgcgaaccccaacgccaacccgaacgccaaccccaacgccaaccccaacgccaaccccaacgcgaacccgaacgccaaccccaacgccaaccccaacgccaaccccaacgcgaacccgaacgccaaccccaacgccaaccccaacgccaaccccaacgccaacccgaacgcgaacccgcccgugaccaacauggagaacaucaccagcggcuuccugggcccccuccugguccugcaggccggguucuuccuccugacccggauccugacgaucccccagucccucgacagcugguggaccucccugaacuuccugggcgggagccccgugugccucggccagaacucccagagccccaccuccaaccacagccccaccuccugcccgcccaucugccccggguaccgcuggaugugccugcggcgcuucaucaucuuccuguucauccuccugcugugccucaucuuccugcuggugcuccuggacuaccagggcaugcugcccgucugcccgcucauccccggcagcacgaccaccaacaccgggcccugcaagacgugcaccaccccggcccagggcaacagcauguuccccuccugcugcugcaccaagcccacggacgggaacugcacgugcauccccaucccgagcuccugggccuucgccaaguaccugugggagugggcgagcgugcgguucuccuggcugagccuccuggugcccuucguccagugguucgugggccugucccccaccguguggcucagcgccaucuggaugaugugguacuggggccccucccuguacagcaucgucuccccguucaucccccugcuccccaucuucuucugccuguggguguacaucugaggacuaguuauaagacugacuagcccgaugggccucccaacgggcccuccuccccuccuugcaccgagauuaaucaaaggcucuuuucagagccaccaaaaaaaaaaaaaaaaaaaaaaaaaaaaaaaaaaaaaaaaaaaaaaaaaaaaaaaaaaaaaaaaaaaaaaaaaaaaaaaaaaaaaaaaaaaaaaaaaaaaagaauu

SEQ ID NO: 9692 - RNA, 1844 nt, Artificial Sequence
  mRNA Design i-3 (hSL-A100-N5) comprising derived and/or modified sequence from Pf(3D7)__XP_001351122.1__HsALB_Pf-CSP(19-272)_L(AAY)_Pf-CSP(346-3 65)_L(AAY)_PADRE_L(PVTN)_HBsAg (opt1)
aggagaaagcuuaccaugaagugggugaccuucaucagccugcuguuccuguucuccagcgccuacucccuguuccaggaguaccagugcuacggcagcuccagcaacacccgcguccucaacgagcugaacuacgacaacgccgggaccaaccuguacaacgagcucgagaugaacuacuacggcaagcaggagaacugguacucccugaagaagaacagccggucccugggggagaacgacgacggcaacaacgaggacaacgagaagcuccgcaagcccaagcacaagaagcugaagcagccggcggacgggaaccccgaccccaacgccaaccccaacguggacccgaacgccaaccccaacguggaccccaacgccaaccccaacgucgacccgaacgccaaccccaacgcgaaccccaacgccaaccccaacgccaacccgaacgccaaccccaacgcgaaccccaacgccaaccccaacgccaacccgaacgccaaccccaacgccaaccccaacgcgaaccccaacgccaacccgaacgccaaccccaacgccaaccccaacgccaaccccaacgcgaacccgaacgccaaccccaacguggaccccaacgccaaccccaacgccaacccgaacgccaaccccaacgcgaaccccaacgccaacccgaacgccaaccccaacgccaaccccaacgccaaccccaacgcgaacccgaacgccaaccccaacgccaaccccaacgccaaccccaacgcgaacccgaacgccaaccccaacgccaaccccaacgccaaccccaacgccaacccgaacgcgaaccccgccgccuacaucaagcccggcagcgccaacaagcccaaggacgagcuggacuacgccaacgacaucgaggcggccuacgccaaguucguggccgccuggacccucaaggcggccgccccggucaccaacauggagaacaucaccuccggcuuccuggggccccugcucgugcugcaggccggcuucuuccugcucacgcggauccugaccaucccccagagccuggacuccugguggaccagccucaacuuccucgggggcucccccgugugccuggggcagaacagccaguccccgaccagcaaccacucccccacgagcugcccgcccaucugccccggcuaccgcuggaugugccuccggcgcuucaucaucuuccuguucauccugcuccugugccugaucuuccuccugguccugcucgacuaccagggcaugcugcccgugugcccccugaucccggggagcaccaccaccaacacgggccccugcaagaccugcaccacccccgcgcaggggaacuccauguuccccagcugcugcugcacgaagccgaccgacggcaacugcacgugcauccccauccccuccagcugggccuucgccaaguaccucugggagugggccuccgugcgguucagcuggcugucccugcucguccccuucgugcagugguucgugggccugagcccgaccgucuggcuguccgccaucuggaugaugugguacugggggcccagccucuacuccaucgugagccccuucaucccccugcugccgaucuucuucugccucuggguguacaucugaggacuaguuauaagacugacuagcccgaugggccucccaacgggcccuccuccccuccuugcaccgagauuaaucaaaggcucuuuucagagccaccaaaaaaaaaaaaaaaaaaaaaaaaaaaaaaaaaaaaaaaaaaaaaaaaaaaaaaaaaaaaaaaaaaaaaaaaaaaaaaaaaaaaaaaaaaaaaaaaaaaaagaauu

SEQ ID NO: 9693 - RNA, 2063 nt, Artificial Sequence
  mRNA Design i-3 (hSL-A100-N5) comprising derived and/or modified sequence from Pf(3D7)__XP_001351122.1__HsALB_Pf-CSP(19-384)_L(PVTN)_HBsAg (opt1)
aggagaaagcuuaccaugaagugggugaccuucaucagccugcuguuccuguucuccagcgccuacucccuguuccaggaguaccagugcuacggcagcuccagcaacacccgcguccucaacgagcugaacuacgacaacgccgggacgaaccuguacaacgagcucgagaugaacuacuacggcaagcaggagaacugguacucccugaagaagaacagccggucccugggggagaacgacgacggcaacaacgaggacaacgagaagcuccgcaagcccaagcacaagaagcugaagcagccggcggacgggaaccccgaccccaacgccaaccccaacguggacccgaacgccaaccccaacguggaccccaacgccaaccccaacgucgacccgaacgccaaccccaacgcgaaccccaacgccaaccccaacgccaacccgaacgccaaccccaacgcgaaccccaacgccaaccccaacgccaacccgaacgccaaccccaacgccaaccccaacgcgaaccccaacgccaacccgaacgccaaccccaacgccaaccccaacgccaaccccaacgcgaacccgaacgccaaccccaacguggaccccaacgccaaccccaacgccaacccgaacgccaaccccaacgcgaaccccaacgccaacccgaacgccaaccccaacgccaaccccaacgccaaccccaacgcgaacccgaacgccaaccccaacgccaaccccaacgccaaccccaacgcgaacccgaacgccaaccccaacgccaaccccaacgccaaccccaacgccaacccgaacgcgaaccccaacaagaacaaccagggcaacggccaggggcacaacaugcccaacgaccccaaccggaacguggacgagaacgccaacgccaacagcgccgucaagaacaacaacaacgaggagccguccgacaagcacaucaaggaguaccugaacaagauccagaacagccucuccaccgaguggagccccugcuccgugaccugcggcaacgggauccaggugcgcaucaagcccggcagcgccaacaagcccaaggacgagcuggacuacgcgaacgacaucgagaagaagaucugcaagauggagaagugcuccagcgucuucaacguggugaacuccagcccggucaccaacauggagaacaucacgagcggguuccugggcccccuccuggugcugcaggccggcuucuuccuccugacccggauccugaccaucccccagucccucgacagcugguggaccucccugaacuuccucgggggcagccccgugugccucgggcagaacucccagagcccgacguccaaccacagccccaccuccugcccgcccaucugccccggcuaccgcuggaugugccugcggcgcuucaucaucuuccuguucauccuccugcugugccucaucuuccugcugguccuccuggacuaccagggcaugcugcccgugugcccccucaucccggggagcaccaccacgaacaccggccccugcaagaccugcaccacgcccgcccaggggaacuccauguuccccagcugcugcugcaccaagccgaccgacggcaacugcacgugcauccccauccccuccagcugggccuucgccaaguaccugugggagugggcguccgugcgguucagcuggcugucccuccugguccccuucgugcagugguucguggggcugagcccgaccgucuggcucuccgccaucuggaugaugugguacuggggccccagccuguacagcaucgugucccccuucaucccccugcucccgaucuucuucugccuguggguguacaucugaggacuaguuauaagacugacuagcccgaugggccucccaacgggcccuccuccccuccuugcaccgagauuaaucaaaggcucuuuucagagccaccaaaaaaaaaaaaaaaaaaaaaaaaaaaaaaaaaaaaaaaaaaaaaaaaaaaaaaaaaaaaaaaaaaaaaaaaaaaaaaaaaaaaaaaaaaaaaaaaaaaaagaauu

SEQ ID NO: 9694 - RNA, 1880 nt, Artificial Sequence
  mRNA Design i-3 (hSL-A100-N5) comprising derived and/or modified sequence from Pf(3D7)__XP_001351122.1__HsALB_Pf-CSP(19-384)_L(SGG)_Ferritin (opt1)
aggagaaagcuuaccaugaagugggugaccuucaucagccuccuguuccuguucuccagcgccuacucccuguuccaggaguaccagugcuacggcagcuccagcaacacccggguccucaacgagcugaacuacgacaacgccgggacgaaccuguacaacgagcucgagaugaacuacuacggcaagcaggagaacugguacucccugaagaagaacagccggucccugggggagaacgacgacggcaacaacgaggacaacgagaagcuccgcaagcccaagcacaagaagcugaagcagccggcggacgggaaccccgaccccaacgccaaccccaacguggacccgaacgccaaccccaacguggaccccaacgccaaccccaacgucgacccgaacgccaaccccaacgcgaaccccaacgccaaccccaacgccaacccgaacgccaaccccaacgcgaaccccaacgccaaccccaacgccaacccgaacgccaaccccaacgccaaccccaacgcgaaccccaacgccaacccgaacgccaaccccaacgccaaccccaacgccaaccccaacgcgaacccgaacgccaaccccaacguggaccccaacgccaaccccaacgccaacccgaacgccaaccccaacgcgaaccccaacgccaacccgaacgccaaccccaacgccaaccccaacgccaaccccaacgcgaacccgaacgccaaccccaacgccaaccccaacgccaaccccaacgcgaacccgaacgccaaccccaacgccaaccccaacgccaaccccaacgccaacccgaacgcgaaccccaacaagaacaaccagggcaacggccaggggcacaacaugcccaacgaccccaaccggaacguggacgagaacgccaacgccaacagcgccgucaagaacaacaacaacgaggagccguccgacaagcacaucaaggaguaccugaacaagauccagaacagccucuccaccgaguggagccccugcuccgugaccugcggcaacgggauccaggugcgcaucaagcccggcagcgccaacaagcccaaggacgagcuggacuacgcgaacgacaucgagaagaagaucugcaagauggagaagugcuccagcgucuucaacguggugaacuccagcagcgggggccuguccaaggacaucaucaagcuccugaacgagcaggucaacaaggagaugaacagcuccaaccuguacaugagcauguccagcuggugcuacacccacucccucgacggcgccgggcuguuccuguucgaccacgccgccgaggaguacgagcacgccaagaagcucaucaucuuccugaacgagaacaacgugccggugcagcugacgagcaucuccgcgcccgagcacaaguucgagggccucacccagaucuuccagaaggccuacgagcacgagcagcacaucagcgaguccaucaacaacaucgucgaccacgccaucaagagcaaggaccacgccaccuucaacuuccugcagugguacguggcggagcagcacgaggaggaggugcuguucaaggacauccucgacaagaucgagcugaucgggaacgagaaccacggccuguaccucgccgaccaguacgucaagggcaucgccaagucccgcaagagcugaggacuaguuauaagacugacuagcccgaugggccucccaacgggcccuccuccccuccuugcaccgagauuaaucaaaggcucuuuucagagccaccaaaaaaaaaaaaaaaaaaaaaaaaaaaaaaaaaaaaaaaaaaaaaaaaaaaaaaaaaaaaaaaaaaaaaaaaaaaaaaaaaaaaaaaaaaaaaaaaaaaaagaauu

SEQ ID NO: 9695 - RNA, 1841 nt, Artificial Sequence
  mRNA Design i-3 (hSL-A100-N5) comprising derived and/or modified sequence from Pf(3D7)__XP_001351122.1__HsALB_Pf-CSP(93-384)_L(PVTN)_HBsAg (opt1)
aggagaaagcuuaccaugaagugggugaccuucaucagccuccuguuccuguucuccagcgccuacuccaagcugaagcagcccgccgacggcaacccggaccccaacgcgaaccccaacgucgaccccaacgccaacccgaacguggaccccaacgccaaccccaacguggaccccaacgccaacccgaacgccaaccccaacgcgaaccccaacgccaaccccaacgccaacccgaacgccaaccccaacgcgaaccccaacgccaaccccaacgccaacccgaacgccaaccccaacgccaaccccaacgcgaaccccaacgccaacccgaacgccaaccccaacgccaaccccaacgccaaccccaacgcgaacccgaacgucgaccccaacgccaaccccaacgccaaccccaacgccaacccgaacgccaaccccaacgcgaaccccaacgccaacccgaacgccaaccccaacgccaaccccaacgccaaccccaacgcgaacccgaacgccaaccccaacgccaaccccaacgccaaccccaacgcgaacccgaacgccaaccccaacgccaaccccaacgccaaccccaacgccaacccgaacaagaacaaccaggggaacggccaggggcacaacaugcccaacgaccccaaccgcaacguggacgagaacgcgaacgccaacagcgccgugaagaacaacaacaacgaggagcccuccgacaagcacaucaaggaguaccucaacaagauccagaacagccuguccaccgaguggagcccgugcuccgugaccugcggcaacgggauccagguccggaucaagcccggcagcgccaacaagcccaaggacgagcuggacuacgccaacgacaucgagaagaagaucugcaagauggagaagugcuccagcguguucaacgucgugaacuccagccccgugaccaacauggagaacaucaccuccggcuuccucgggccgcugcugguccuccaggcgggcuucuuccugcugacccgcauccucacgaucccccagagccuggacuccugguggaccagccugaacuuccucgggggcucccccgugugccuggggcagaacagccagagccccaccuccaaccacagcccgaccuccugcccgcccaucugccccggcuaccgguggaugugccugcgccgguucaucaucuuccucuucauccugcugcucugccugaucuuccugcucgugcugcuggacuaccagggcaugcuccccgucugcccccugauccccgggagcacgaccaccaacaccggcccgugcaagacgugcaccacccccgcccaggggaacuccauguuccccagcugcugcugcaccaagcccacggacggcaacugcacgugcaucccgauccccuccagcugggccuucgccaaguaccugugggagugggccuccgugcgcuucagcuggcucucccugcuggugcccuucguccagugguucgugggccucagccccaccguguggcuguccgcgaucuggaugaugugguacugggggccgagccuguacuccaucgucagccccuucaucccccuccugcccaucuucuucugccuguggguguacaucugaggacuaguuauaagacugacuagcccgaugggccucccaacgggcccuccuccccuccuugcaccgagauuaaucaaaggcucuuuucagagccaccaaaaaaaaaaaaaaaaaaaaaaaaaaaaaaaaaaaaaaaaaaaaaaaaaaaaaaaaaaaaaaaaaaaaaaaaaaaaaaaaaaaaaaaaaaaaaaaaaaaaagaauu

SEQ ID NO: 9696 - RNA, 1502 nt, Artificial Sequence; identical to SEQ ID NO: 7832
  mRNA Design i-3 (hSL-A100-N5) comprising derived and/or modified sequence from Pf(3D7)__XP_001351122.1__HsALB_Pf-CSP(199-377)_L(PVTN)_HBsAg (opt1)

SEQ ID NO: 9697 - RNA, 1199 nt, Artificial Sequence
  mRNA Design i-3 (hSL-A100-N5) comprising derived and/or modified sequence from Pf(3D7)__XP_001351122.1__HsALB_Pf-CSP(19-272)_L(AAY)_Pf-CSP(346-3 75)_L(AAY)_Pf-CSP(310-327) (opt1)
aggagaaagcuuaccaugaagugggugaccuucaucagccuccuguuccuguucuccagcgccuacucccuguuccaggaguaccagugcuacggcagcuccagcaacacccgcguccucaacgagcugaacuacgacaacgccgggacgaaccuguacaacgagcucgagaugaacuacuacggcaagcaggagaacugguacucccugaagaagaacagccggucccugggggagaacgacgacggcaacaacgaggacaacgagaagcuccgcaagcccaagcacaagaagcugaagcagccggcggacgggaaccccgaccccaacgccaaccccaacguggacccgaacgccaaccccaacguggaccccaacgccaaccccaacgucgacccgaacgccaaccccaacgcgaaccccaacgccaaccccaacgccaacccgaacgccaaccccaacgcgaaccccaacgccaaccccaacgccaacccgaacgccaaccccaacgccaaccccaacgcgaaccccaacgccaacccgaacgccaaccccaacgccaaccccaacgccaaccccaacgcgaacccgaacgccaaccccaacguggaccccaacgccaaccccaacgccaacccgaacgccaaccccaacgcgaaccccaacgccaacccgaacgccaaccccaacgccaaccccaacgccaaccccaacgcgaacccgaacgccaaccccaacgccaaccccaacgccaaccccaacgcgaacccgaacgccaaccccaacgccaaccccaacgccaaccccaacgccaacccgaacgcgaaccccgccgccuacaucaagcccggcagcgccaacaagcccaaggacgagcuggacuacgccaacgacaucgagaagaagaucugcaagauggagaagugcuccgcggccuacgagccgagcgacaagcacaucaaggaguaccucaacaagauccagaacucccugugaggacuaguuauaagacugacuagcccgaugggccucccaacgggcccuccuccccuccuugcaccgagauuaaucaaaggcucuuuucagagccaccaaaaaaaaaaaaaaaaaaaaaaaaaaaaaaaaaaaaaaaaaaaaaaaaaaaaaaaaaaaaaaaaaaaaaaaaaaaaaaaaaaaaaaaaaaaaaaaaaaaaagaauu

SEQ ID NO: 9698 - RNA, 1247 nt, Artificial Sequence
  mRNA Design i-3 (hSL-A100-N5) comprising derived and/or modified sequence from Pf(3D7)__XP_001351122.1__HsALB_Pf-CSP(19-272)_L(AAY)_Pf-CSP(346-3 75)_L(AAY)_Pf-CSP(310-327)_L(AAY)_PADRE (opt1)
aggagaaagcuuaccaugaagugggugaccuucaucagccuccuguuccuguucuccagcgccuacucccuguuccaggaguaccagugcuacggcagcuccagcaacacccgcguccucaacgagcugaacuacgacaacgccgggacgaaccuguacaacgagcucgagaugaacuacuacggcaagcaggagaacugguacucccugaagaagaacagccggucccugggggagaacgacgacggcaacaacgaggacaacgagaagcuccgcaagcccaagcacaagaagcugaagcagccggcggacgggaaccccgaccccaacgccaaccccaacguggacccgaacgccaaccccaacguggaccccaacgccaaccccaacgucgacccgaacgccaaccccaacgcgaaccccaacgccaaccccaacgccaacccgaacgccaaccccaacgcgaaccccaacgccaaccccaacgccaacccgaacgccaaccccaacgccaaccccaacgcgaaccccaacgccaacccgaacgccaaccccaacgccaaccccaacgccaaccccaacgcgaacccgaacgccaaccccaacguggaccccaacgccaaccccaacgccaacccgaacgccaaccccaacgcgaaccccaacgccaacccgaacgccaaccccaacgccaaccccaacgccaaccccaacgcgaacccgaacgccaaccccaacgccaaccccaacgccaaccccaacgcgaacccgaacgccaaccccaacgccaaccccaacgccaaccccaacgccaacccgaacgcgaaccccgccgccuacaucaagcccggcagcgccaacaagcccaaggacgagcuggacuacgccaacgacaucgagaagaagaucugcaagauggagaagugcuccgcggccuacgagccgagcgacaagcacaucaaggaguaccucaacaagauccagaacucccuggccgccuacgccaaguucguggcggccuggacccugaaggccgccgcgugaggacuaguuauaagacugacuagcccgaugggccucccaacgggcccuccuccccuccuugcaccgagauuaaucaaaggcucuuuucagagccaccaaaaaaaaaaaaaaaaaaaaaaaaaaaaaaaaaaaaaaaaaaaaaaaaaaaaaaaaaaaaaaaaaaaaaaaaaaaaaaaaaaaaaaaaaaaaaaaaaaaaagaauu

SEQ ID NO: 9699 - RNA, 1247 nt, Artificial Sequence
  mRNA Design i-3 (hSL-A100-N5) comprising derived and/or modified sequence from Pf(3D7)__XP_001351122.1__HsALB_Pf-CSP(19-272)_L(AAY)_Pf-CSP(310-3 27)_L(AAY)_Pf-CSP(346-375)_L(AAY)_PADRE (opt1)
aggagaaagcuuaccaugaagugggugaccuucaucagccuccuguuccuguucuccagcgccuacucccuguuccaggaguaccagugcuacggcagcuccagcaacacccgcguccucaacgagcugaacuacgacaacgccgggacgaaccuguacaacgagcucgagaugaacuacuacggcaagcaggagaacugguacucccugaagaagaacagccggucccugggggagaacgacgacggcaacaacgaggacaacgagaagcuccgcaagcccaagcacaagaagcugaagcagccggcggacgggaaccccgaccccaacgccaaccccaacguggacccgaacgccaaccccaacguggaccccaacgccaaccccaacgucgacccgaacgccaaccccaacgcgaaccccaacgccaaccccaacgccaacccgaacgccaaccccaacgcgaaccccaacgccaaccccaacgccaacccgaacgccaaccccaacgccaaccccaacgcgaaccccaacgccaacccgaacgccaaccccaacgccaaccccaacgccaaccccaacgcgaacccgaacgccaaccccaacguggaccccaacgccaaccccaacgccaacccgaacgccaaccccaacgcgaaccccaacgccaacccgaacgccaaccccaacgccaaccccaacgccaaccccaacgcgaacccgaacgccaaccccaacgccaaccccaacgccaaccccaacgcgaacccgaacgccaaccccaacgccaaccccaacgccaaccccaacgccaacccgaacgcgaaccccgccgccuacgagcccagcgacaagcacaucaaggaguaccugaacaagauccagaacucccucgccgccuacaucaagcccggcagcgcgaacaagccgaaggacgagcuggacuacgccaacgacaucgagaagaagaucugcaagauggagaagugcuccgccgccuacgccaaguucguggcggccuggacccugaaggccgccgcgugaggacuaguuauaagacugacuagcccgaugggccucccaacgggcccuccuccccuccuugcaccgagauuaaucaaaggcucuuuucagagccaccaaaaaaaaaaaaaaaaaaaaaaaaaaaaaaaaaaaaaaaaaaaaaaaaaaaaaaaaaaaaaaaaaaaaaaaaaaaaaaaaaaaaaaaaaaaaaaaaaaaaagaauu

SEQ ID NO: 9700 - RNA, 1301 nt, Artificial Sequence
  mRNA Design i-3 (hSL-A100-N5) comprising derived and/or modified sequence from Pf(3D7)__XP_001351122.1__HsALB_Pf-CSP(19-272)_L(AAY)_Pf-CSP(310-3 27)_L(AAY)_Pf-CSP(346-375)_L(AAY)_PADRE_L(AAY)_P2 (opt1)
aggagaaagcuuaccaugaagugggugaccuucaucagccuccuguuccuguucuccagcgccuacucccuguuccaggaguaccagugcuacggcagcuccagcaacacccgcguccucaacgagcugaacuacgacaacgccgggacgaaccuguacaacgagcucgagaugaacuacuacggcaagcaggagaacugguacucccugaagaagaacagccggucccugggggagaacgacgacggcaacaacgaggacaacgagaagcuccgcaagcccaagcacaagaagcugaagcagccggcggacgggaaccccgaccccaacgccaaccccaacguggacccgaacgccaaccccaacguggaccccaacgccaaccccaacgucgacccgaacgccaaccccaacgcgaaccccaacgccaaccccaacgccaacccgaacgccaaccccaacgcgaaccccaacgccaaccccaacgccaacccgaacgccaaccccaacgccaaccccaacgcgaaccccaacgccaacccgaacgccaaccccaacgccaaccccaacgccaaccccaacgcgaacccgaacgccaaccccaacguggaccccaacgccaaccccaacgccaacccgaacgccaaccccaacgcgaaccccaacgccaacccgaacgccaaccccaacgccaaccccaacgccaaccccaacgcgaacccgaacgccaaccccaacgccaaccccaacgccaaccccaacgcgaacccgaacgccaaccccaacgccaaccccaacgccaaccccaacgccaacccgaacgcgaaccccgccgccuacgagcccagcgacaagcacaucaaggaguaccugaacaagauccagaacucccucgccgccuacaucaagcccggcagcgcgaacaagccgaaggacgagcuggacuacgccaacgacaucgagaagaagaucugcaagauggagaagugcuccgccgccuacgccaaguucguggcggccuggacccugaaggccgccgcggccgccuaccaguacaucaaggccaacagcaaguucaucggcaucaccgagcucugaggacuaguuauaagacugacuagcccgaugggccucccaacgggcccuccuccccuccuugcaccgagauuaaucaaaggcucuuuucagagccaccaaaaaaaaaaaaaaaaaaaaaaaaaaaaaaaaaaaaaaaaaaaaaaaaaaaaaaaaaaaaaaaaaaaaaaaaaaaaaaaaaaaaaaaaaaaaaaaaaaaaagaauu

SEQ ID NO: 9701 - RNA, 1265 nt, Artificial Sequence
  mRNA Design i-3 (hSL-A100-N5) comprising derived and/or modified sequence from Pf(3D7)__XP_001351122.1__HsALB_Pf-CSP(19-272)_L(AAY)_Pf-CSP(310-3 27)_Linker (AAY)_Pf-CSP(346-397) (opt1)
aggagaaagcuuaccaugaagugggugaccuucaucagccuccuguuccuguucuccagcgccuacucccuguuccaggaguaccagugcuacggcagcuccagcaacacccgcguccucaacgagcugaacuacgacaacgccgggacgaaccuguacaacgagcucgagaugaacuacuacggcaagcaggagaacugguacucccugaagaagaacagccggucccugggggagaacgacgacggcaacaacgaggacaacgagaagcuccgcaagcccaagcacaagaagcugaagcagccggcggacgggaaccccgaccccaacgccaaccccaacguggacccgaacgccaaccccaacguggaccccaacgccaaccccaacgucgacccgaacgccaaccccaacgcgaaccccaacgccaaccccaacgccaacccgaacgccaaccccaacgcgaaccccaacgccaaccccaacgccaacccgaacgccaaccccaacgccaaccccaacgcgaaccccaacgccaacccgaacgccaaccccaacgccaaccccaacgccaaccccaacgcgaacccgaacgccaaccccaacguggaccccaacgccaaccccaacgccaacccgaacgccaaccccaacgcgaaccccaacgccaacccgaacgccaaccccaacgccaaccccaacgccaaccccaacgcgaacccgaacgccaaccccaacgccaaccccaacgccaaccccaacgcgaacccgaacgccaaccccaacgccaaccccaacgccaaccccaacgccaacccgaacgcgaaccccgccgccuacgagcccagcgacaagcacaucaaggaguaccugaacaagauccagaacucccucgccgccuacaucaagcccggcagcgcgaacaagccgaaggacgagcuggacuacgccaacgacaucgagaagaagaucugcaagauggagaagugcuccagcguguucaacgucgugaacuccagcaucggccugaucauggugcucuccuuccuguuccugaacugaggacuaguuauaagacugacuagcccgaugggccucccaacgggcccuccuccccuccuugcaccgagauuaaucaaaggcucuuuucagagccaccaaaaaaaaaaaaaaaaaaaaaaaaaaaaaaaaaaaaaaaaaaaaaaaaaaaaaaaaaaaaaaaaaaaaaaaaaaaaaaaaaaaaaaaaaaaaaaaaaaaaagaauu

SEQ ID NO: 9702 - RNA, 1865 nt, Artificial Sequence
  mRNA Design i-3 (hSL-A100-N5) comprising derived and/or modified sequence from Pf(3D7)__XP_001351122.1__LumSynt_L(GGS4-GGG)_Pf-CSP(19-397) (opt2)
aggagaaagcuuaccaugcagaucuacgagggcaagcucaccgccgagggccuccgcuucggcaucgucgccucccgcuucaaccacgcccucgucgaccgccucgucgagggcgccaucgacgccaucguccgccacggcggccgcgaggaggacaucacccucguccgcguccccggcuccugggagauccccgucgccgccggcgagcucgcccgcaaggaggacaucgacgccgucaucgccaucggcguccucauccgcggcgccaccccccacuucgacuacaucgccuccgaggucuccaagggccucgccgaccucucccucgagcuccgcaagcccaucaccuucggcgucaucaccgccgacacccucgagcaggccaucgagcgcgccggcaccaagcacggcaacaagggcugggaggccgcccucuccgccaucgagauggccaaccucuucaagucccuccgcggcggcuccggcggcuccggcggcuccggcggcuccggcggcggccucuuccaggaguaccagugcuacggcuccuccuccaacacccgcguccucaacgagcucaacuacgacaacgccggcaccaaccucuacaacgagcucgagaugaacuacuacggcaagcaggagaacugguacucccucaagaagaacucccgcucccucggcgagaacgacgacggcaacaacgaggacaacgagaagcuccgcaagcccaagcacaagaagcucaagcagcccgccgacggcaaccccgaccccaacgccaaccccaacgucgaccccaacgccaaccccaacgucgaccccaacgccaaccccaacgucgaccccaacgccaaccccaacgccaaccccaacgccaaccccaacgccaaccccaacgccaaccccaacgccaaccccaacgccaaccccaacgccaaccccaacgccaaccccaacgccaaccccaacgccaaccccaacgccaaccccaacgccaaccccaacgccaaccccaacgccaaccccaacgccaaccccaacgccaaccccaacgucgaccccaacgccaaccccaacgccaaccccaacgccaaccccaacgccaaccccaacgccaaccccaacgccaaccccaacgccaaccccaacgccaaccccaacgccaaccccaacgccaaccccaacgccaaccccaacgccaaccccaacgccaaccccaacgccaaccccaacgccaaccccaacgccaaccccaacgccaaccccaacgccaaccccaacaagaacaaccagggcaacggccagggccacaacaugcccaacgaccccaaccgcaacgucgacgagaacgccaacgccaacuccgccgucaagaacaacaacaacgaggagcccuccgacaagcacaucaaggaguaccucaacaagauccagaacucccucuccaccgaguggucccccugcuccgucaccugcggcaacggcauccagguccgcaucaagcccggcuccgccaacaagcccaaggacgagcucgacuacgccaacgacaucgagaagaagaucugcaagauggagaagugcuccuccgucuucaacgucgucaacuccuccaucggccucaucaugguccucuccuuccucuuccucaacugaggacuaguuauaagacugacuagcccgaugggccucccaacgggcccuccuccccuccuugcaccgagauuaaucaaaggcucuuuucagagccaccaaaaaaaaaaaaaaaaaaaaaaaaaaaaaaaaaaaaaaaaaaaaaaaaaaaaaaaaaaaaaaaaaaaaaaaaaaaaaaaaaaaaaaaaaaaaaaaaaaaaagaauu

SEQ ID NO: 9703 - RNA, 1727 nt, Artificial Sequence
  mRNA Design i-3 (hSL-A100-N5) comprising derived and/or modified sequence from Pf(3D7)__XP_001351122.1__HsALB_Pf-CSP(19-272)_L(PVTN)_HBsAg (opt2)
aggagaaagcuuaccaugaagugggucaccuucaucucccuccucuuccucuucuccuccgccuacucccucuuccaggaguaccagugcuacggcuccuccuccaacacccgcguccucaacgagcucaacuacgacaacgccggcaccaaccucuacaacgagcucgagaugaacuacuacggcaagcaggagaacugguacucccucaagaagaacucccgcucccucggcgagaacgacgacggcaacaacgaggacaacgagaagcuccgcaagcccaagcacaagaagcucaagcagcccgccgacggcaaccccgaccccaacgccaaccccaacgucgaccccaacgccaaccccaacgucgaccccaacgccaaccccaacgucgaccccaacgccaaccccaacgccaaccccaacgccaaccccaacgccaaccccaacgccaaccccaacgccaaccccaacgccaaccccaacgccaaccccaacgccaaccccaacgccaaccccaacgccaaccccaacgccaaccccaacgccaaccccaacgccaaccccaacgccaaccccaacgccaaccccaacgccaaccccaacgucgaccccaacgccaaccccaacgccaaccccaacgccaaccccaacgccaaccccaacgccaaccccaacgccaaccccaacgccaaccccaacgccaaccccaacgccaaccccaacgccaaccccaacgccaaccccaacgccaaccccaacgccaaccccaacgccaaccccaacgccaaccccaacgccaaccccaacgccaaccccaacgccaacccccccgucaccaacauggagaacaucaccuccggcuuccucggcccccuccucguccuccaggccggcuucuuccuccucacccgcauccucaccaucccccagucccucgacuccugguggaccucccucaacuuccucggcggcucccccgucugccucggccagaacucccagucccccaccuccaaccacucccccaccuccugcccccccaucugccccggcuaccgcuggaugugccuccgccgcuucaucaucuuccucuucauccuccuccucugccucaucuuccuccucguccuccucgacuaccagggcaugcuccccgucugcccccucauccccggcuccaccaccaccaacaccggccccugcaagaccugcaccacccccgcccagggcaacuccauguuccccuccugcugcugcaccaagcccaccgacggcaacugcaccugcauccccauccccuccuccugggccuucgccaaguaccucugggagugggccuccguccgcuucuccuggcucucccuccucguccccuucguccagugguucgucggccucucccccaccgucuggcucuccgccaucuggaugaugugguacuggggccccucccucuacuccaucgucucccccuucaucccccuccuccccaucuucuucugccucugggucuacaucugaggacuaguuauaagacugacuagcccgaugggccucccaacgggcccuccuccccuccuugcaccgagauuaaucaaaggcucuuuucagagccaccaaaaaaaaaaaaaaaaaaaaaaaaaaaaaaaaaaaaaaaaaaaaaaaaaaaaaaaaaaaaaaaaaaaaaaaaaaaaaaaaaaaaaaaaaaaaaaaaaaaaagaauu

SEQ ID NO: 9704 - RNA, 1844 nt, Artificial Sequence
  mRNA Design i-3 (hSL-A100-N5) comprising derived and/or modified sequence from Pf(3D7)__XP_001351122.1__HsALB_Pf-CSP(19-272)_L(AAY)_Pf-CSP(346-3 65)_L(AAY)_PADRE_L(PVTN)_HBsAg (opt2)
aggagaaagcuuaccaugaagugggucaccuucaucucccuccucuuccucuucuccuccgccuacucccucuuccaggaguaccagugcuacggcuccuccuccaacacccgcguccucaacgagcucaacuacgacaacgccggcaccaaccucuacaacgagcucgagaugaacuacuacggcaagcaggagaacugguacucccucaagaagaacucccgcucccucggcgagaacgacgacggcaacaacgaggacaacgagaagcuccgcaagcccaagcacaagaagcucaagcagcccgccgacggcaaccccgaccccaacgccaaccccaacgucgaccccaacgccaaccccaacgucgaccccaacgccaaccccaacgucgaccccaacgccaaccccaacgccaaccccaacgccaaccccaacgccaaccccaacgccaaccccaacgccaaccccaacgccaaccccaacgccaaccccaacgccaaccccaacgccaaccccaacgccaaccccaacgccaaccccaacgccaaccccaacgccaaccccaacgccaaccccaacgccaaccccaacgccaaccccaacgucgaccccaacgccaaccccaacgccaaccccaacgccaaccccaacgccaaccccaacgccaaccccaacgccaaccccaacgccaaccccaacgccaaccccaacgccaaccccaacgccaaccccaacgccaaccccaacgccaaccccaacgccaaccccaacgccaaccccaacgccaaccccaacgccaaccccaacgccaaccccaacgccaaccccgccgccuacaucaagcccggcuccgccaacaagcccaaggacgagcucgacuacgccaacgacaucgaggccgccuacgccaaguucgucgccgccuggacccucaaggccgccgcccccgucaccaacauggagaacaucaccuccggcuuccucggcccccuccucguccuccaggccggcuucuuccuccucacccgcauccucaccaucccccagucccucgacuccugguggaccucccucaacuuccucggcggcucccccgucugccucggccagaacucccagucccccaccuccaaccacucccccaccuccugcccccccaucugccccggcuaccgcuggaugugccuccgccgcuucaucaucuuccucuucauccuccuccucugccucaucuuccuccucguccuccucgacuaccagggcaugcuccccgucugcccccucauccccggcuccaccaccaccaacaccggccccugcaagaccugcaccacccccgcccagggcaacuccauguuccccuccugcugcugcaccaagcccaccgacggcaacugcaccugcauccccauccccuccuccugggccuucgccaaguaccucugggagugggccuccguccgcuucuccuggcucucccuccucguccccuucguccagugguucgucggccucucccccaccgucuggcucuccgccaucuggaugaugugguacuggggccccucccucuacuccaucgucucccccuucaucccccuccuccccaucuucuucugccucugggucuacaucugaggacuaguuauaagacugacuagcccgaugggccucccaacgggcccuccuccccuccuugcaccgagauuaaucaaaggcucuuuucagagccaccaaaaaaaaaaaaaaaaaaaaaaaaaaaaaaaaaaaaaaaaaaaaaaaaaaaaaaaaaaaaaaaaaaaaaaaaaaaaaaaaaaaaaaaaaaaaaaaaaaaaagaauu

SEQ ID NO: 9705 - RNA, 2063 nt, Artificial Sequence
  mRNA Design i-3 (hSL-A100-N5) comprising derived and/or modified sequence from Pf(3D7)__XP_001351122.1__HsALB_Pf-CSP(19-384)_L(PVTN)_HBsAg (opt2)
aggagaaagcuuaccaugaagugggucaccuucaucucccuccucuuccucuucuccuccgccuacucccucuuccaggaguaccagugcuacggcuccuccuccaacacccgcguccucaacgagcucaacuacgacaacgccggcaccaaccucuacaacgagcucgagaugaacuacuacggcaagcaggagaacugguacucccucaagaagaacucccgcucccucggcgagaacgacgacggcaacaacgaggacaacgagaagcuccgcaagcccaagcacaagaagcucaagcagcccgccgacggcaaccccgaccccaacgccaaccccaacgucgaccccaacgccaaccccaacgucgaccccaacgccaaccccaacgucgaccccaacgccaaccccaacgccaaccccaacgccaaccccaacgccaaccccaacgccaaccccaacgccaaccccaacgccaaccccaacgccaaccccaacgccaaccccaacgccaaccccaacgccaaccccaacgccaaccccaacgccaaccccaacgccaaccccaacgccaaccccaacgccaaccccaacgccaaccccaacgucgaccccaacgccaaccccaacgccaaccccaacgccaaccccaacgccaaccccaacgccaaccccaacgccaaccccaacgccaaccccaacgccaaccccaacgccaaccccaacgccaaccccaacgccaaccccaacgccaaccccaacgccaaccccaacgccaaccccaacgccaaccccaacgccaaccccaacgccaaccccaacgccaaccccaacaagaacaaccagggcaacggccagggccacaacaugcccaacgaccccaaccgcaacgucgacgagaacgccaacgccaacuccgccgucaagaacaacaacaacgaggagcccuccgacaagcacaucaaggaguaccucaacaagauccagaacucccucuccaccgaguggucccccugcuccgucaccugcggcaacggcauccagguccgcaucaagcccggcuccgccaacaagcccaaggacgagcucgacuacgccaacgacaucgagaagaagaucugcaagauggagaagugcuccuccgucuucaacgucgucaacuccucccccgucaccaacauggagaacaucaccuccggcuuccucggcccccuccucguccuccaggccggcuucuuccuccucacccgcauccucaccaucccccagucccucgacuccugguggaccucccucaacuuccucggcggcucccccgucugccucggccagaacucccagucccccaccuccaaccacucccccaccuccugcccccccaucugccccggcuaccgcuggaugugccuccgccgcuucaucaucuuccucuucauccuccuccucugccucaucuuccuccucguccuccucgacuaccagggcaugcuccccgucugcccccucauccccggcuccaccaccaccaacaccggccccugcaagaccugcaccacccccgcccagggcaacuccauguuccccuccugcugcugcaccaagcccaccgacggcaacugcaccugcauccccauccccuccuccugggccuucgccaaguaccucugggagugggccuccguccgcuucuccuggcucucccuccucguccccuucguccagugguucgucggccucucccccaccgucuggcucuccgccaucuggaugaugugguacuggggccccucccucuacuccaucgucucccccuucaucccccuccuccccaucuucuucugccucugggucuacaucugaggacuaguuauaagacugacuagcccgaugggccucccaacgggcccuccuccccuccuugcaccgagauuaaucaaaggcucuuuucagagccaccaaaaaaaaaaaaaaaaaaaaaaaaaaaaaaaaaaaaaaaaaaaaaaaaaaaaaaaaaaaaaaaaaaaaaaaaaaaaaaaaaaaaaaaaaaaaaaaaaaaaagaauu

SEQ ID NO: 9706 - RNA, 1880 nt, Artificial Sequence
  mRNA Design i-3 (hSL-A100-N5) comprising derived and/or modified sequence from Pf(3D7)__XP_001351122.1__HsALB_Pf-CSP(19-384)_L(SGG)_Ferritin (opt2)
aggagaaagcuuaccaugaagugggucaccuucaucucccuccucuuccucuucuccuccgccuacucccucuuccaggaguaccagugcuacggcuccuccuccaacacccgcguccucaacgagcucaacuacgacaacgccggcaccaaccucuacaacgagcucgagaugaacuacuacggcaagcaggagaacugguacucccucaagaagaacucccgcucccucggcgagaacgacgacggcaacaacgaggacaacgagaagcuccgcaagcccaagcacaagaagcucaagcagcccgccgacggcaaccccgaccccaacgccaaccccaacgucgaccccaacgccaaccccaacgucgaccccaacgccaaccccaacgucgaccccaacgccaaccccaacgccaaccccaacgccaaccccaacgccaaccccaacgccaaccccaacgccaaccccaacgccaaccccaacgccaaccccaacgccaaccccaacgccaaccccaacgccaaccccaacgccaaccccaacgccaaccccaacgccaaccccaacgccaaccccaacgccaaccccaacgccaaccccaacgucgaccccaacgccaaccccaacgccaaccccaacgccaaccccaacgccaaccccaacgccaaccccaacgccaaccccaacgccaaccccaacgccaaccccaacgccaaccccaacgccaaccccaacgccaaccccaacgccaaccccaacgccaaccccaacgccaaccccaacgccaaccccaacgccaaccccaacgccaaccccaacgccaaccccaacaagaacaaccagggcaacggccagggccacaacaugcccaacgaccccaaccgcaacgucgacgagaacgccaacgccaacuccgccgucaagaacaacaacaacgaggagcccuccgacaagcacaucaaggaguaccucaacaagauccagaacucccucuccaccgaguggucccccugcuccgucaccugcggcaacggcauccagguccgcaucaagcccggcuccgccaacaagcccaaggacgagcucgacuacgccaacgacaucgagaagaagaucugcaagauggagaagugcuccuccgucuucaacgucgucaacuccuccuccggcggccucuccaaggacaucaucaagcuccucaacgagcaggucaacaaggagaugaacuccuccaaccucuacauguccauguccuccuggugcuacacccacucccucgacggcgccggccucuuccucuucgaccacgccgccgaggaguacgagcacgccaagaagcucaucaucuuccucaacgagaacaacguccccguccagcucaccuccaucuccgcccccgagcacaaguucgagggccucacccagaucuuccagaaggccuacgagcacgagcagcacaucuccgaguccaucaacaacaucgucgaccacgccaucaaguccaaggaccacgccaccuucaacuuccuccagugguacgucgccgagcagcacgaggaggagguccucuucaaggacauccucgacaagaucgagcucaucggcaacgagaaccacggccucuaccucgccgaccaguacgucaagggcaucgccaagucccgcaaguccugaggacuaguuauaagacugacuagcccgaugggccucccaacgggcccuccuccccuccuugcaccgagauuaaucaaaggcucuuuucagagccaccaaaaaaaaaaaaaaaaaaaaaaaaaaaaaaaaaaaaaaaaaaaaaaaaaaaaaaaaaaaaaaaaaaaaaaaaaaaaaaaaaaaaaaaaaaaaaaaaaaaaagaauu

SEQ ID NO: 9707 - RNA, 1841 nt, Artificial Sequence
  mRNA Design i-3 (hSL-A100-N5) comprising derived and/or modified sequence from Pf(3D7)__XP_001351122.1__HsALB_Pf-CSP(93-384)_L(PVTN)_HBsAg (opt2)
aggagaaagcuuaccaugaagugggucaccuucaucucccuccucuuccucuucuccuccgccuacuccaagcucaagcagcccgccgacggcaaccccgaccccaacgccaaccccaacgucgaccccaacgccaaccccaacgucgaccccaacgccaaccccaacgucgaccccaacgccaaccccaacgccaaccccaacgccaaccccaacgccaaccccaacgccaaccccaacgccaaccccaacgccaaccccaacgccaaccccaacgccaaccccaacgccaaccccaacgccaaccccaacgccaaccccaacgccaaccccaacgccaaccccaacgccaaccccaacgccaaccccaacgccaaccccaacgucgaccccaacgccaaccccaacgccaaccccaacgccaaccccaacgccaaccccaacgccaaccccaacgccaaccccaacgccaaccccaacgccaaccccaacgccaaccccaacgccaaccccaacgccaaccccaacgccaaccccaacgccaaccccaacgccaaccccaacgccaaccccaacgccaaccccaacgccaaccccaacgccaaccccaacaagaacaaccagggcaacggccagggccacaacaugcccaacgaccccaaccgcaacgucgacgagaacgccaacgccaacuccgccgucaagaacaacaacaacgaggagcccuccgacaagcacaucaaggaguaccucaacaagauccagaacucccucuccaccgaguggucccccugcuccgucaccugcggcaacggcauccagguccgcaucaagcccggcuccgccaacaagcccaaggacgagcucgacuacgccaacgacaucgagaagaagaucugcaagauggagaagugcuccuccgucuucaacgucgucaacuccucccccgucaccaacauggagaacaucaccuccggcuuccucggcccccuccucguccuccaggccggcuucuuccuccucacccgcauccucaccaucccccagucccucgacuccugguggaccucccucaacuuccucggcggcucccccgucugccucggccagaacucccagucccccaccuccaaccacucccccaccuccugcccccccaucugccccggcuaccgcuggaugugccuccgccgcuucaucaucuuccucuucauccuccuccucugccucaucuuccuccucguccuccucgacuaccagggcaugcuccccgucugcccccucauccccggcuccaccaccaccaacaccggccccugcaagaccugcaccacccccgcccagggcaacuccauguuccccuccugcugcugcaccaagcccaccgacggcaacugcaccugcauccccauccccuccuccugggccuucgccaaguaccucugggagugggccuccguccgcuucuccuggcucucccuccucguccccuucguccagugguucgucggccucucccccaccgucuggcucuccgccaucuggaugaugugguacuggggccccucccucuacuccaucgucucccccuucaucccccuccuccccaucuucuucugccucugggucuacaucugaggacuaguuauaagacugacuagcccgaugggccucccaacgggcccuccuccccuccuugcaccgagauuaaucaaaggcucuuuucagagccaccaaaaaaaaaaaaaaaaaaaaaaaaaaaaaaaaaaaaaaaaaaaaaaaaaaaaaaaaaaaaaaaaaaaaaaaaaaaaaaaaaaaaaaaaaaaaaaaaaaaaagaauu

SEQ ID NO: 9708 - RNA, 1502 nt, Artificial Sequence; identical to SEQ ID NO: 7862
  mRNA Design i-3 (hSL-A100-N5) comprising derived and/or modified sequence from Pf(3D7)__XP_001351122.1__HsALB_Pf-CSP(199-377)_L(PVTN)_HBsAg (opt2)

SEQ ID NO: 9709 - RNA, 1199 nt, Artificial Sequence
  mRNA Design i-3 (hSL-A100-N5) comprising derived and/or modified sequence from Pf(3D7)__XP_001351122.1__HsALB_Pf-CSP(19-272)_L(AAY)_Pf-CSP(346-3 75)_L(AAY)_Pf-CSP(310-327) (opt2)
aggagaaagcuuaccaugaagugggucaccuucaucucccuccucuuccucuucuccuccgccuacucccucuuccaggaguaccagugcuacggcuccuccuccaacacccgcguccucaacgagcucaacuacgacaacgccggcaccaaccucuacaacgagcucgagaugaacuacuacggcaagcaggagaacugguacucccucaagaagaacucccgcucccucggcgagaacgacgacggcaacaacgaggacaacgagaagcuccgcaagcccaagcacaagaagcucaagcagcccgccgacggcaaccccgaccccaacgccaaccccaacgucgaccccaacgccaaccccaacgucgaccccaacgccaaccccaacgucgaccccaacgccaaccccaacgccaaccccaacgccaaccccaacgccaaccccaacgccaaccccaacgccaaccccaacgccaaccccaacgccaaccccaacgccaaccccaacgccaaccccaacgccaaccccaacgccaaccccaacgccaaccccaacgccaaccccaacgccaaccccaacgccaaccccaacgccaaccccaacgucgaccccaacgccaaccccaacgccaaccccaacgccaaccccaacgccaaccccaacgccaaccccaacgccaaccccaacgccaaccccaacgccaaccccaacgccaaccccaacgccaaccccaacgccaaccccaacgccaaccccaacgccaaccccaacgccaaccccaacgccaaccccaacgccaaccccaacgccaaccccaacgccaaccccgccgccuacaucaagcccggcuccgccaacaagcccaaggacgagcucgacuacgccaacgacaucgagaagaagaucugcaagauggagaagugcuccgccgccuacgagcccuccgacaagcacaucaaggaguaccucaacaagauccagaacucccucugaggacuaguuauaagacugacuagcccgaugggccucccaacgggcccuccuccccuccuugcaccgagauuaaucaaaggcucuuuucagagccaccaaaaaaaaaaaaaaaaaaaaaaaaaaaaaaaaaaaaaaaaaaaaaaaaaaaaaaaaaaaaaaaaaaaaaaaaaaaaaaaaaaaaaaaaaaaaaaaaaaaaagaauu

SEQ ID NO: 9710 - RNA, 1247 nt, Artificial Sequence
  mRNA Design i-3 (hSL-A100-N5) comprising derived and/or modified sequence from Pf(3D7)__XP_001351122.1__HsALB_Pf-CSP(19-272)_L(AAY)_Pf-CSP(346-3 75)_L(AAY)_Pf-CSP(310-327)_L(AAY)_PADRE (opt2)
aggagaaagcuuaccaugaagugggucaccuucaucucccuccucuuccucuucuccuccgccuacucccucuuccaggaguaccagugcuacggcuccuccuccaacacccgcguccucaacgagcucaacuacgacaacgccggcaccaaccucuacaacgagcucgagaugaacuacuacggcaagcaggagaacugguacucccucaagaagaacucccgcucccucggcgagaacgacgacggcaacaacgaggacaacgagaagcuccgcaagcccaagcacaagaagcucaagcagcccgccgacggcaaccccgaccccaacgccaaccccaacgucgaccccaacgccaaccccaacgucgaccccaacgccaaccccaacgucgaccccaacgccaaccccaacgccaaccccaacgccaaccccaacgccaaccccaacgccaaccccaacgccaaccccaacgccaaccccaacgccaaccccaacgccaaccccaacgccaaccccaacgccaaccccaacgccaaccccaacgccaaccccaacgccaaccccaacgccaaccccaacgccaaccccaacgccaaccccaacgucgaccccaacgccaaccccaacgccaaccccaacgccaaccccaacgccaaccccaacgccaaccccaacgccaaccccaacgccaaccccaacgccaaccccaacgccaaccccaacgccaaccccaacgccaaccccaacgccaaccccaacgccaaccccaacgccaaccccaacgccaaccccaacgccaaccccaacgccaaccccaacgccaaccccgccgccuacaucaagcccggcuccgccaacaagcccaaggacgagcucgacuacgccaacgacaucgagaagaagaucugcaagauggagaagugcuccgccgccuacgagcccuccgacaagcacaucaaggaguaccucaacaagauccagaacucccucgccgccuacgccaaguucgucgccgccuggacccucaaggccgccgccugaggacuaguuauaagacugacuagcccgaugggccucccaacgggcccuccuccccuccuugcaccgagauuaaucaaaggcucuuuucagagccaccaaaaaaaaaaaaaaaaaaaaaaaaaaaaaaaaaaaaaaaaaaaaaaaaaaaaaaaaaaaaaaaaaaaaaaaaaaaaaaaaaaaaaaaaaaaaaaaaaaaaagaauu

SEQ ID NO: 9711 - RNA, 1247 nt, Artificial Sequence
  mRNA Design i-3 (hSL-A100-N5) comprising derived and/or modified sequence from Pf(3D7)__XP_001351122.1__HsALB_Pf-CSP(19-272)_L(AAY)_Pf-CSP(310-3 27)_L(AAY)_Pf-CSP(346-375)_L(AAY)_PADRE (opt2)
aggagaaagcuuaccaugaagugggucaccuucaucucccuccucuuccucuucuccuccgccuacucccucuuccaggaguaccagugcuacggcuccuccuccaacacccgcguccucaacgagcucaacuacgacaacgccggcaccaaccucuacaacgagcucgagaugaacuacuacggcaagcaggagaacugguacucccucaagaagaacucccgcucccucggcgagaacgacgacggcaacaacgaggacaacgagaagcuccgcaagcccaagcacaagaagcucaagcagcccgccgacggcaaccccgaccccaacgccaaccccaacgucgaccccaacgccaaccccaacgucgaccccaacgccaaccccaacgucgaccccaacgccaaccccaacgccaaccccaacgccaaccccaacgccaaccccaacgccaaccccaacgccaaccccaacgccaaccccaacgccaaccccaacgccaaccccaacgccaaccccaacgccaaccccaacgccaaccccaacgccaaccccaacgccaaccccaacgccaaccccaacgccaaccccaacgccaaccccaacgucgaccccaacgccaaccccaacgccaaccccaacgccaaccccaacgccaaccccaacgccaaccccaacgccaaccccaacgccaaccccaacgccaaccccaacgccaaccccaacgccaaccccaacgccaaccccaacgccaaccccaacgccaaccccaacgccaaccccaacgccaaccccaacgccaaccccaacgccaaccccaacgccaaccccgccgccuacgagcccuccgacaagcacaucaaggaguaccucaacaagauccagaacucccucgccgccuacaucaagcccggcuccgccaacaagcccaaggacgagcucgacuacgccaacgacaucgagaagaagaucugcaagauggagaagugcuccgccgccuacgccaaguucgucgccgccuggacccucaaggccgccgccugaggacuaguuauaagacugacuagcccgaugggccucccaacgggcccuccuccccuccuugcaccgagauuaaucaaaggcucuuuucagagccaccaaaaaaaaaaaaaaaaaaaaaaaaaaaaaaaaaaaaaaaaaaaaaaaaaaaaaaaaaaaaaaaaaaaaaaaaaaaaaaaaaaaaaaaaaaaaaaaaaaaaagaauu

SEQ ID NO: 9712 - RNA, 1301 nt, Artificial Sequence
  mRNA Design i-3 (hSL-A100-N5) comprising derived and/or modified sequence from Pf(3D7)__XP_001351122.1__HsALB_Pf-CSP(19-272)_L(AAY)_Pf-CSP(310-3 27)_L(AAY)_Pf-CSP(346-375)_L(AAY)_PADRE_L(AAY)_P2 (opt2)
aggagaaagcuuaccaugaagugggucaccuucaucucccuccucuuccucuucuccuccgccuacucccucuuccaggaguaccagugcuacggcuccuccuccaacacccgcguccucaacgagcucaacuacgacaacgccggcaccaaccucuacaacgagcucgagaugaacuacuacggcaagcaggagaacugguacucccucaagaagaacucccgcucccucggcgagaacgacgacggcaacaacgaggacaacgagaagcuccgcaagcccaagcacaagaagcucaagcagcccgccgacggcaaccccgaccccaacgccaaccccaacgucgaccccaacgccaaccccaacgucgaccccaacgccaaccccaacgucgaccccaacgccaaccccaacgccaaccccaacgccaaccccaacgccaaccccaacgccaaccccaacgccaaccccaacgccaaccccaacgccaaccccaacgccaaccccaacgccaaccccaacgccaaccccaacgccaaccccaacgccaaccccaacgccaaccccaacgccaaccccaacgccaaccccaacgccaaccccaacgucgaccccaacgccaaccccaacgccaaccccaacgccaaccccaacgccaaccccaacgccaaccccaacgccaaccccaacgccaaccccaacgccaaccccaacgccaaccccaacgccaaccccaacgccaaccccaacgccaaccccaacgccaaccccaacgccaaccccaacgccaaccccaacgccaaccccaacgccaaccccaacgccaaccccgccgccuacgagcccuccgacaagcacaucaaggaguaccucaacaagauccagaacucccucgccgccuacaucaagcccggcuccgccaacaagcccaaggacgagcucgacuacgccaacgacaucgagaagaagaucugcaagauggagaagugcuccgccgccuacgccaaguucgucgccgccuggacccucaaggccgccgccgccgccuaccaguacaucaaggccaacuccaaguucaucggcaucaccgagcucugaggacuaguuauaagacugacuagcccgaugggccucccaacgggcccuccuccccuccuugcaccgagauuaaucaaaggcucuuuucagagccaccaaaaaaaaaaaaaaaaaaaaaaaaaaaaaaaaaaaaaaaaaaaaaaaaaaaaaaaaaaaaaaaaaaaaaaaaaaaaaaaaaaaaaaaaaaaaaaaaaaaaagaauu

SEQ ID NO: 9713 - RNA, 1265 nt, Artificial Sequence
  mRNA Design i-3 (hSL-A100-N5) comprising derived and/or modified sequence from Pf(3D7)__XP_001351122.1__HsALB_Pf-CSP(19-272)_L(AAY)_Pf-CSP(310-3 27)_Linker (AAY)_Pf-CSP(346-397) (opt2)
aggagaaagcuuaccaugaagugggucaccuucaucucccuccucuuccucuucuccuccgccuacucccucuuccaggaguaccagugcuacggcuccuccuccaacacccgcguccucaacgagcucaacuacgacaacgccggcaccaaccucuacaacgagcucgagaugaacuacuacggcaagcaggagaacugguacucccucaagaagaacucccgcucccucggcgagaacgacgacggcaacaacgaggacaacgagaagcuccgcaagcccaagcacaagaagcucaagcagcccgccgacggcaaccccgaccccaacgccaaccccaacgucgaccccaacgccaaccccaacgucgaccccaacgccaaccccaacgucgaccccaacgccaaccccaacgccaaccccaacgccaaccccaacgccaaccccaacgccaaccccaacgccaaccccaacgccaaccccaacgccaaccccaacgccaaccccaacgccaaccccaacgccaaccccaacgccaaccccaacgccaaccccaacgccaaccccaacgccaaccccaacgccaaccccaacgccaaccccaacgucgaccccaacgccaaccccaacgccaaccccaacgccaaccccaacgccaaccccaacgccaaccccaacgccaaccccaacgccaaccccaacgccaaccccaacgccaaccccaacgccaaccccaacgccaaccccaacgccaaccccaacgccaaccccaacgccaaccccaacgccaaccccaacgccaaccccaacgccaaccccaacgccaaccccgccgccuacgagcccuccgacaagcacaucaaggaguaccucaacaagauccagaacucccucgccgccuacaucaagcccggcuccgccaacaagcccaaggacgagcucgacuacgccaacgacaucgagaagaagaucugcaagauggagaagugcuccuccgucuucaacgucgucaacuccuccaucggccucaucaugguccucuccuuccucuuccucaacugaggacuaguuauaagacugacuagcccgaugggccucccaacgggcccuccuccccuccuugcaccgagauuaaucaaaggcucuuuucagagccaccaaaaaaaaaaaaaaaaaaaaaaaaaaaaaaaaaaaaaaaaaaaaaaaaaaaaaaaaaaaaaaaaaaaaaaaaaaaaaaaaaaaaaaaaaaaaaaaaaaaaagaauu

SEQ ID NO: 9714 - RNA, 1865 nt, Artificial Sequence
  mRNA Design i-3 (hSL-A100-N5) comprising derived and/or modified sequence from Pf(3D7)__XP_001351122.1__LumSynt_L(GGS4-GGG)_Pf-CSP(19-397) (opt3)
aggagaaagcuuaccaugcagaucuacgagggcaagcugaccgccgaagggcucagauucggaauuguggcuagcagguuuaaccacgcacuugucgaccggcugguugagggugccauagaugcgaucgugcgccauggcgggcgagaagaggacauuacauugguacgugugcccggauccugggaaaucccugucgcugccggcgaguuagcaagaaaagaggauauugacgccgugaucgcuauagguguucugaucaggggagcaacuccacacuucgauuauauugccucugaagugucaaaggggcuagcugaccucagucuggagcuucggaaaccgaucacguuuggcgucauuaccgccgauacacuggaacaagcgaucgagcgcgcaggcacuaagcaugggaauaaaggaugggaggccgcuuugagcgccauagaaauggcaaaccucuucaagucccugagagguggcucugggggaucgggcgguucagggggaagcggcggcgggcuguuucaggaguaccagugcuauggaaguuccucuaauaccagggugcucaacgaauuaaauuacgacaacgcugguacaaaucuguauaacgagcuugaaaugaauuacuauggcaagcaggagaacugguacagcuugaaaaagaacucccggucacugggggagaaugaugacggaaauaacgaagauaaugagaaacuacgcaagcccaaacacaagaagcucaaacaaccugccgacggcaacccagaucccaacgcgaauccuaacguagacccaaaugccaaccccaauguugacccuaacgcaaauccaaacguggauccgaaugcuaaccccaaugccaacccuaaugcuaacccaaaugccaaccccaacgcaaauccuaacgccaauccaaacgcuaaucccaacgcgaauccgaacgcaaauccuaacgccaaucccaacgcuaauccaaacgccaauccuaacgcaaaccccaaugccaacccaaaugcuaaccccaaugccaacccuaaugcaaacccaaaugucgacccgaacgcgaaucccaacgcuaauccuaacgccaauccaaacgcaaaccccaaugccaacccuaaugcuaacccaaaugccaaccccaaugcaaacccgaaugcuaacccuaaugccaacccaaaugcgaaccccaaugccaacccuaaugcuaaccccaacgcaaauccaaacgccaauccuaacgcuaaucccaacgccaauccaaacgcaaauccgaacaagaauaaccaggguaaugggcagggccauaacaugccuaaugaucccaaccgaaacguggacgaaaaugcgaacgccaauagugcugugaaaaacaauaacaaugaggaaccaagcgauaagcacauuaaagaguaccugaacaagauccaaaauucucuuuccaccgaguggucacccugcagcgucacuugcggaaacggcauucagguuagaaucaaaccugggagugccaauaagccaaaggacgaacuggauuaugcaaacgacaucgagaaaaagauuuguaaaauggaaaaguguucuuccguguucaauguagugaacagcucgauaggauugaucaugguccucucuuuucuguucuuaaauugaggacuaguuauaagacugacuagcccgaugggccucccaacgggcccuccuccccuccuugcaccgagauuaaucaaaggcucuuuucagagccaccaaaaaaaaaaaaaaaaaaaaaaaaaaaaaaaaaaaaaaaaaaaaaaaaaaaaaaaaaaaaaaaaaaaaaaaaaaaaaaaaaaaaaaaaaaaaaaaaaaaaagaauu

SEQ ID NO: 9715 - RNA, 1727 nt, Artificial Sequence
  mRNA Design i-3 (hSL-A100-N5) comprising derived and/or modified sequence from Pf(3D7)__XP_001351122.1__HsALB_Pf-CSP(19-272)_L(PVTN)_HBsAg (opt3)
aggagaaagcuuaccaugaagugggugaccuucaucagccugcucuuucuuuucuccucugccuacucacuguuucaggaguaucaaugcuacggcaguagcuccaacacaagagucuugaaugaauuaaacuaugacaaugcugggacuaaccuguacaaugagcuagaaaugaacuauuacggaaaacaggagaauugguauucucucaagaaaaacucgaggucacugggugaaaaugaugacggcaacaaugaggauaacgagaaacuucggaagcccaagcacaagaaacugaagcagccugcagacgggaauccagauccgaacgccaaucccaacguugacccuaacgcgaauccaaacguggaucccaaugcuaacccuaauguagacccaaacgccaaucccaacgcaaauccuaacgccaauccaaacgcuaauccgaacgcaaaucccaacgccaacccuaaugcuaacccaaaugccaaccccaaugcgaacccuaaugcaaacccaaaugccaaccccaaugcuaacccgaaugccaacccuaaugcaaaccccaacgcuaauccaaacgccaauccuaacgcgaaucccaacguggauccaaaugccaaccccaaugcaaacccuaaugcuaacccaaaugccaacccgaaugcuaaccccaacgccaauccuaacgcaaauccaaacgccaaucccaacgcuaauccuaacgcgaauccaaacgcaaaucccaacgccaauccgaacgcuaauccuaacgccaauccaaacgcaaaccccaaugccaacccuaaugcuaaccccaaugccaacccaccugucacgaauauggaaaacauuaccagcggauucuugggcccccuccuggugcugcaggcaggguuuuuccucuuaacacgcauacugacuaucccacaaagucuugacuccugguggaccucuuugaauuuucuggguggaagcccgguuugucuaggccagaacucccagucaccuacaaguaaucauagccccaccucuugcccacccauuuguccuggcuaccgauggaugugccuccguagauucaucauuuuucuguucauccuucuguugugucucauauuucuguuagugcugcucgauuaccaggggaugcuuccagucugcccccugaucccuggauccacuacaaccaacacggguccguguaaaacuugcaccacaccagcgcaaggcaauucaauguuccccagcuguugcuguacuaagccuaccgacgggaacugcacaugcauuccaauccccaguucuugggcuuuugccaaauauuugugggagugggcauccgugagguucagcuggcuaucgcugcucguaccuuucguucagugguuugugggacugucuccgaccgucuggcuuuccgccauuuggaugaugugguacuggggccccucacuguauaguaucgugagcccauucauaccuuugcuccccaucuuuuucugucuguggguguacauuugaggacuaguuauaagacugacuagcccgaugggccucccaacgggcccuccuccccuccuugcaccgagauuaaucaaaggcucuuuucagagccaccaaaaaaaaaaaaaaaaaaaaaaaaaaaaaaaaaaaaaaaaaaaaaaaaaaaaaaaaaaaaaaaaaaaaaaaaaaaaaaaaaaaaaaaaaaaaaaaaaaaaagaauu

SEQ ID NO: 9716 - RNA, 1844 nt, Artificial Sequence
  mRNA Design i-3 (hSL-A100-N5) comprising derived and/or modified sequence from Pf(3D7)__XP_001351122.1__HsALB_Pf-CSP(19-272)_L(AAY)_Pf-CSP(346-3 65)_L(AAY)_PADRE_L(PVTN)_HBsAg (opt3)
aggagaaagcuuaccaugaagugggugaccuucaucagccugcucuuucuuuucuccucugccuacucacuguuucaggaguaucaaugcuacggcaguagcuccaacacaagagucuugaaugaauuaaacuaugacaaugcugggacuaaccuguacaaugagcuagaaaugaacuauuacggaaaacaggagaauugguauucucucaagaaaaacucgaggucacugggugaaaaugaugacggcaacaaugaggauaacgagaaacuucggaagcccaagcacaagaaacugaagcagccugcagacgggaauccagauccgaacgccaaucccaacguugacccuaacgcgaauccaaacguggaucccaaugcuaacccuaauguagacccaaacgccaaucccaacgcaaauccuaacgccaauccaaacgcuaauccgaacgcaaaucccaacgccaacccuaaugcuaacccaaaugccaaccccaaugcgaacccuaaugcaaacccaaaugccaaccccaaugcuaacccgaaugccaacccuaaugcaaaccccaacgcuaauccaaacgccaauccuaacgcgaaucccaacguggauccaaaugccaaccccaaugcaaacccuaaugcuaacccaaaugccaacccgaaugcuaaccccaacgccaauccuaacgcaaauccaaacgccaaucccaacgcuaauccuaacgcgaauccaaacgcaaaucccaacgccaauccgaacgcuaauccuaacgccaauccaaacgcaaaccccaaugccaacccuaaugcuaaccccaaugccaacccagcagcguacauuaaaccuggaagcgcuaauaagcccaaagacgaauuggauuacgccaacgacauagaggcagccuaugcuaaguucgucgccgcauggacgcucaaggcugccgcgccagugaccaauauggaaaacaucacaaguggcuuucuggguccgcugcucguuuuacaggccggguucuuucugcuuacucgcauuuugaccaucccucaaucccuggauucuugguggacaagccuaaauuuccucggaggcucccccgugugucugggccagaacucacagaguccaaccagcaaucauucucccacuuccugcccuccaauuugucccggguaccgauggaugugccuucguagauuuaucauauuccuguuuaucuugcuccuguguuuaauuuuccugcucguccuucuggacuaucagggaauguugccugugugcccgcuaaucccagguucaacaaccacgaacacuggccccuguaaaaccugcacaacuccugcucaagggaauagcauguuuccaaguuguugcuguaccaagcccacagacggaaacuguaccugcauuccuaucccgucuuccugggcauucgccaaauaccugugggagugggcuagcguaagguucucguggcucucucugcuuguucccuuugugcagugguucgucggccuguccccaacggugugguugucagccauauggaugaugugguauugggguccuagucucuacagcauugugucccccuuuaucccacuguuaccuauuuucuuuugccugugggucuauaucugaggacuaguuauaagacugacuagcccgaugggccucccaacgggcccuccuccccuccuugcaccgagauuaaucaaaggcucuuuucagagccaccaaaaaaaaaaaaaaaaaaaaaaaaaaaaaaaaaaaaaaaaaaaaaaaaaaaaaaaaaaaaaaaaaaaaaaaaaaaaaaaaaaaaaaaaaaaaaaaaaaaaagaauu

SEQ ID NO: 9717 - RNA, 2063 nt, Artificial Sequence
  mRNA Design i-3 (hSL-A100-N5) comprising derived and/or modified sequence from Pf(3D7)__XP_001351122.1__HsALB_Pf-CSP(19-384)_L(PVTN)_HBsAg (opt3)
aggagaaagcuuaccaugaagugggugaccuucaucagccugcucuuucuuuucuccucugccuacucacuguuucaggaguaucaaugcuacggcaguagcuccaacacaagagucuugaaugaauuaaacuaugacaaugcugggacuaaccuguacaaugagcuagaaaugaacuauuacggaaaacaggagaauugguauucucucaagaaaaacucgaggucacugggugaaaaugaugacggcaacaaugaggauaacgagaaacuucggaagcccaagcacaagaaacugaagcagccugcagacgggaauccagauccgaacgccaaucccaacguugacccuaacgcgaauccaaacguggaucccaaugcuaacccuaauguagacccaaacgccaaucccaacgcaaauccuaacgccaauccaaacgcuaauccgaacgcaaaucccaacgccaacccuaaugcuaacccaaaugccaaccccaaugcgaacccuaaugcaaacccaaaugccaaccccaaugcuaacccgaaugccaacccuaaugcaaaccccaacgcuaauccaaacgccaauccuaacgcgaaucccaacguggauccaaaugccaaccccaaugcaaacccuaaugcuaacccaaaugccaacccgaaugcuaaccccaacgccaauccuaacgcaaauccaaacgccaaucccaacgcuaauccuaacgcgaauccaaacgcaaaucccaacgccaauccgaacgcuaauccuaacgccaauccaaacgcaaaccccaaugccaacccuaaugcuaaccccaaugccaacccaaauaaaaacaaucagggaaacggccaaggucauaauaugccuaacgaccccaaucgcaacgucgaugaaaaugcaaacgcgaacagcgcugugaagaauaacaauaacgaggaaccaagugacaaacacauuaaggaguacuugaauaagauacagaacucccucucuacggaguggagcccguguuccguuaccugcgggaauggaauccaggugcgaauuaaaccuggcucagccaacaagcccaaagaugaacuggacuacgcaaaugacaucgagaagaaaauuuguaagauggaaaaaugcaguagcgucuucaacgugguaaauucuuccccaguuacaaacauggagaauaucacuucaggcuuucuggggccccucuuagugcugcaggccggauucuuucuuuugacccguauacugacaaucccucaaagccuagauaguugguggaccucucucaacuuccuggguggcuccccagucugucuugggcagaauagccagucgcccacuucuaaccauuccccuacaucaugcccgccaauuugucccggauauagauggaugugccugaggcgguuuaucauuuucuuguuuauccuccuguuaugucugauauuccuccuugugcuguuggacuaccagggcaugcuaccugugugcccacugauucccgguaguaccacgacuaacaccgggccuuguaagacaugcacuaccccggcucaaggaaauagcauguuucccuccugcuguugcacaaagccaaccgauggcaacuguacgugcaucccuauucccucuagcugggccuucgcaaaauaucucugggaaugggcuucaguccgcuucaguuggcugucccuucugguuccauuugugcagugguucguaggcuugagcccuacuguguggcucucugccaucuggaugaugugguacugggggcccucacuguauaguaucgucagcccauuuauuccguuacugccuauauucuuuugucuauggguguacaucugaggacuaguuauaagacugacuagcccgaugggccucccaacgggcccuccuccccuccuugcaccgagauuaaucaaaggcucuuuucagagccaccaaaaaaaaaaaaaaaaaaaaaaaaaaaaaaaaaaaaaaaaaaaaaaaaaaaaaaaaaaaaaaaaaaaaaaaaaaaaaaaaaaaaaaaaaaaaaaaaaaaaagaauu

SEQ ID NO: 9718 - RNA, 1880 nt, Artificial Sequence
  mRNA Design i-3 (hSL-A100-N5) comprising derived and/or modified sequence from Pf(3D7)__XP_001351122.1__HsALB_Pf-CSP(19-384)_L(SGG)_Ferritin (opt3)
aggagaaagcuuaccaugaagugggugaccuucaucagccugcucuuucuuuucuccucugccuacucacuguuucaggaguaucaaugcuacggcaguagcuccaacacaagagucuugaaugaauuaaacuaugacaaugcugggacuaaccuguacaaugagcuagaaaugaacuauuacggaaaacaggagaauugguauucucucaagaaaaacucgaggucacugggugaaaaugaugacggcaacaaugaggauaacgagaaacuucggaagcccaagcacaagaaacugaagcagccugcagacgggaauccagauccgaacgccaaucccaacguugacccuaacgcgaauccaaacguggaucccaaugcuaacccuaauguagacccaaacgccaaucccaacgcaaauccuaacgccaauccaaacgcuaauccgaacgcaaaucccaacgccaacccuaaugcuaacccaaaugccaaccccaaugcgaacccuaaugcaaacccaaaugccaaccccaaugcuaacccgaaugccaacccuaaugcaaaccccaacgcuaauccaaacgccaauccuaacgcgaaucccaacguggauccaaaugccaaccccaaugcaaacccuaaugcuaacccaaaugccaacccgaaugcuaaccccaacgccaauccuaacgcaaauccaaacgccaaucccaacgcuaauccuaacgcgaauccaaacgcaaaucccaacgccaauccgaacgcuaauccuaacgccaauccaaacgcaaaccccaaugccaacccuaaugcuaaccccaaugccaacccaaauaaaaacaaucagggaaacggccaaggucauaauaugccuaacgaccccaaucgcaacgucgaugaaaaugcaaacgcgaacagcgcugugaagaauaacaauaacgaggaaccaagugacaaacacauuaaggaguacuugaauaagauacagaacucccucucuacggaguggagcccguguuccguuaccugcgggaauggaauccaggugcgaauuaaaccuggcucagccaacaagcccaaagaugaacuggacuacgcaaaugacaucgagaagaaaauuuguaagauggaaaaaugcaguagcgucuucaacgugguaaauucuuccucaggcgggcugagcaaggauaucauaaagcucuuaaacgagcagguuaauaaagaaaugaacaguucuaaucuguauauguccaugagcucgugguguuacacacauucucuugacggagccgguuuguuucuguucgaucacgcugccgaggaguaugaacaugcaaagaaacuaaucauuuuucucaacgagaacaaugugccaguccaacugacuuccaucucagcucccgaacacaaguucgagggccuuacccagauuuuucagaaagccuacgaacacgagcagcauaucagugagagcauaaacaauauuguggaccacgcgaucaaguccaaggaucaugccacauucaacuuucugcaaugguauguggcugaacagcacgaggaagaggucuuguucaaagacauucucgauaagaucgaacugaucgggaaugagaaccacggauuauaccuggcagaccaguauguuaaaggcauugccaagucucguaaaagcugaggacuaguuauaagacugacuagcccgaugggccucccaacgggcccuccuccccuccuugcaccgagauuaaucaaaggcucuuuucagagccaccaaaaaaaaaaaaaaaaaaaaaaaaaaaaaaaaaaaaaaaaaaaaaaaaaaaaaaaaaaaaaaaaaaaaaaaaaaaaaaaaaaaaaaaaaaaaaaaaaaaaagaauu

SEQ ID NO: 9719 - RNA, 1841 nt, Artificial Sequence
  mRNA Design i-3 (hSL-A100-N5) comprising derived and/or modified sequence from Pf(3D7)__XP_001351122.1__HsALB_Pf-CSP(93-384)_L(PVTN)_HBsAg (opt3)
aggagaaagcuuaccaugaagugggugaccuucaucagccugcucuuucuuuucuccucugccuacucaaaacugaagcagcccgcugacggcaacccugauccaaaugcaaacccgaaugucgaccccaacgccaauccuaacguugauccaaaugcgaaccccaauguggacccuaacgcuaauccaaacgccaaucccaacgcaaauccuaacgccaacccaaaugcuaacccgaaugcaaaccccaaugccaacccuaaugcuaacccaaaugccaaccccaaugcgaacccuaaugcaaacccaaaugccaaccccaacgcuaauccgaacgccaauccuaacgcaaaucccaacgcuaauccaaacgccaauccuaacguagaucccaaugcgaacccaaaugccaaccccaaugcaaacccuaacgcuaauccaaacgccaauccgaacgcuaaucccaacgccaauccuaacgcaaauccaaacgccaaucccaacgcuaauccuaacgcgaauccaaacgcaaaccccaaugccaacccgaaugcuaacccuaaugccaacccaaaugcaaaccccaaugccaacccuaaugcuaaccccaauaaaaacaaucaagggaacggacagggucacaauaugccaaacgacccuaacagaaauguggaugagaacgccaaugcaaacagugcggucaagaauaacaauaacgaggaacccagcgacaaacauauuaaggaauauuugaauaagauacagaacuccuuaucuacagaguggucgccaugcucagugacuuguggcaaugggauccagguuaggauuaaaccgggaagcgcuaacaagccuaaagaugaacuggacuacgccaaugauaucgagaagaaaauuugcaagauggagaaguguaguuccguguuuaacgucguaaauucuagccccgugacgaacauggaaaacaucaccuccggcuuccuagguccacuccugguucuucaagcaggguuuuuccuguugacacggauacucacuaucccccagucacuggacaguugguggaccagccugaauuuucucggaggcucuccugugugcuuaggccagaacucccagucaccaacaagcaaucacagucccaccucuuguccuccgauuugcccaggguaucgcuggaugugucugcgacguuucaucauuuuucuuuucaucuugcugcuaugccucauauuucugcuuguccuguuggauuaccaaggaaugcuccccguguguccucugauuccagguuccacuacaaccaacacgggccccugcaaaacuuguaccacuccugcccaggggaauagcauguucccgucgugcugcuguacaaagcccaccgacggaaacugcacauguaucccaauuccuucuuccugggcuuuugccaaauauuuaugggagugggcaucagugagauucaguuggcugagccuccuuguccccuucguucagugguuugugggccuguccccaaccguaugguugucugcuaucuggaugaugugguacugggguccuagccuauauucaaucgugagucccuucauuccacugcucccgauauuuuucugccugugggucuacaucugaggacuaguuauaagacugacuagcccgaugggccucccaacgggcccuccuccccuccuugcaccgagauuaaucaaaggcucuuuucagagccaccaaaaaaaaaaaaaaaaaaaaaaaaaaaaaaaaaaaaaaaaaaaaaaaaaaaaaaaaaaaaaaaaaaaaaaaaaaaaaaaaaaaaaaaaaaaaaaaaaaaaagaauu

SEQ ID NO: 9720 - RNA, 1502 nt, Artificial Sequence; identical to SEQ ID NO: 7892
  mRNA Design i-3 (hSL-A100-N5) comprising derived and/or modified sequence from Pf(3D7)__XP_001351122.1__HsALB_Pf-CSP(199-377)_L(PVTN)_HBsAg (opt3)

SEQ ID NO: 9721 - RNA, 1199 nt, Artificial Sequence
  mRNA Design i-3 (hSL-A100-N5) comprising derived and/or modified sequence from Pf(3D7)__XP_001351122.1__HsALB_Pf-CSP(19-272)_L(AAY)_Pf-CSP(346-3 75)_L(AAY)_Pf-CSP(310-327) (opt3)
aggagaaagcuuaccaugaagugggugaccuucaucagccugcucuuucuuuucuccucugccuacucacuguuucaggaguaucaaugcuacggcaguagcuccaacacaagagucuugaaugaauuaaacuaugacaaugcugggacuaaccuguacaaugagcuagaaaugaacuauuacggaaaacaggagaauugguauucucucaagaaaaacucgaggucacugggugaaaaugaugacggcaacaaugaggauaacgagaaacuucggaagcccaagcacaagaaacugaagcagccugcagacgggaauccagauccgaacgccaaucccaacguugacccuaacgcgaauccaaacguggaucccaaugcuaacccuaauguagacccaaacgccaaucccaacgcaaauccuaacgccaauccaaacgcuaauccgaacgcaaaucccaacgccaacccuaaugcuaacccaaaugccaaccccaaugcgaacccuaaugcaaacccaaaugccaaccccaaugcuaacccgaaugccaacccuaaugcaaaccccaacgcuaauccaaacgccaauccuaacgcgaaucccaacguggauccaaaugccaaccccaaugcaaacccuaaugcuaacccaaaugccaacccgaaugcuaaccccaacgccaauccuaacgcaaauccaaacgccaaucccaacgcuaauccuaacgcgaauccaaacgcaaaucccaacgccaauccgaacgcuaauccuaacgccaauccaaacgcaaaccccaaugccaacccuaaugcuaaccccaaugccaacccagcagcguacauuaaaccuggaagcgcuaauaagcccaaagacgaauuggauuacgccaacgacauagagaagaagaucuguaaaauggaaaagugcagugcagccuaugagccauccgauaaacauauuaaggaguaccucaauaaaauccagaacucucugugaggacuaguuauaagacugacuagcccgaugggccucccaacgggcccuccuccccuccuugcaccgagauuaaucaaaggcucuuuucagagccaccaaaaaaaaaaaaaaaaaaaaaaaaaaaaaaaaaaaaaaaaaaaaaaaaaaaaaaaaaaaaaaaaaaaaaaaaaaaaaaaaaaaaaaaaaaaaaaaaaaaaagaauu

SEQ ID NO: 9722 - RNA, 1247 nt, Artificial Sequence
  mRNA Design i-3 (hSL-A100-N5) comprising derived and/or modified sequence from Pf(3D7)__XP_001351122.1__HsALB_Pf-CSP(19-272)_L(AAY)_Pf-CSP(346-3 75)_L(AAY)_Pf-CSP(310-327)_L(AAY)_PADRE (opt3)
aggagaaagcuuaccaugaagugggugaccuucaucagccugcucuuucuuuucuccucugccuacucacuguuucaggaguaucaaugcuacggcaguagcuccaacacaagagucuugaaugaauuaaacuaugacaaugcugggacuaaccuguacaaugagcuagaaaugaacuauuacggaaaacaggagaauugguauucucucaagaaaaacucgaggucacugggugaaaaugaugacggcaacaaugaggauaacgagaaacuucggaagcccaagcacaagaaacugaagcagccugcagacgggaauccagauccgaacgccaaucccaacguugacccuaacgcgaauccaaacguggaucccaaugcuaacccuaauguagacccaaacgccaaucccaacgcaaauccuaacgccaauccaaacgcuaauccgaacgcaaaucccaacgccaacccuaaugcuaacccaaaugccaaccccaaugcgaacccuaaugcaaacccaaaugccaaccccaaugcuaacccgaaugccaacccuaaugcaaaccccaacgcuaauccaaacgccaauccuaacgcgaaucccaacguggauccaaaugccaaccccaaugcaaacccuaaugcuaacccaaaugccaacccgaaugcuaaccccaacgccaauccuaacgcaaauccaaacgccaaucccaacgcuaauccuaacgcgaauccaaacgcaaaucccaacgccaauccgaacgcuaauccuaacgccaauccaaacgcaaaccccaaugccaacccuaaugcuaaccccaaugccaacccagcagcguacauuaaaccuggaagcgcuaauaagcccaaagacgaauuggauuacgccaacgacauagagaagaagaucuguaaaauggaaaagugcagugcagccuaugagccauccgauaaacauauuaaggaguaccucaauaaaauccagaacucucuggcugccuaugcaaaguucgucgcugccuggacgcugaaagcggccgcuugaggacuaguuauaagacugacuagcccgaugggccucccaacgggcccuccuccccuccuugcaccgagauuaaucaaaggcucuuuucagagccaccaaaaaaaaaaaaaaaaaaaaaaaaaaaaaaaaaaaaaaaaaaaaaaaaaaaaaaaaaaaaaaaaaaaaaaaaaaaaaaaaaaaaaaaaaaaaaaaaaaaaagaauu

SEQ ID NO: 9723 - RNA, 1247 nt, Artificial Sequence
  mRNA Design i-3 (hSL-A100-N5) comprising derived and/or modified sequence from Pf(3D7)__XP_001351122.1__HsALB_Pf-CSP(19-272)_L(AAY)_Pf-CSP(310-3 27)_L(AAY)_Pf-CSP(346-375)_L(AAY)_PADRE (opt3)
aggagaaagcuuaccaugaagugggugaccuucaucagccugcucuuucuuuucuccucugccuacucacuguuucaggaguaucaaugcuacggcaguagcuccaacacaagagucuugaaugaauuaaacuaugacaaugcugggacuaaccuguacaaugagcuagaaaugaacuauuacggaaaacaggagaauugguauucucucaagaaaaacucgaggucacugggugaaaaugaugacggcaacaaugaggauaacgagaaacuucggaagcccaagcacaagaaacugaagcagccugcagacgggaauccagauccgaacgccaaucccaacguugacccuaacgcgaauccaaacguggaucccaaugcuaacccuaauguagacccaaacgccaaucccaacgcaaauccuaacgccaauccaaacgcuaauccgaacgcaaaucccaacgccaacccuaaugcuaacccaaaugccaaccccaaugcgaacccuaaugcaaacccaaaugccaaccccaaugcuaacccgaaugccaacccuaaugcaaaccccaacgcuaauccaaacgccaauccuaacgcgaaucccaacguggauccaaaugccaaccccaaugcaaacccuaaugcuaacccaaaugccaacccgaaugcuaaccccaacgccaauccuaacgcaaauccaaacgccaaucccaacgcuaauccuaacgcgaauccaaacgcaaaucccaacgccaauccgaacgcuaauccuaacgccaauccaaacgcaaaccccaaugccaacccuaaugcuaaccccaaugccaacccagcagcguacgaaccuagcgacaaacauauuaaggaguacuugaauaaaauacagaacagucucgcugccuauaucaagcccggauccgcaaauaagccaaaagaugaacuggacuacgccaacgauauugagaagaaaaucuguaagauggagaaaugcucugcugccuaugcaaaguucgucgcugccuggacgcugaaagcggccgcuugaggacuaguuauaagacugacuagcccgaugggccucccaacgggcccuccuccccuccuugcaccgagauuaaucaaaggcucuuuucagagccaccaaaaaaaaaaaaaaaaaaaaaaaaaaaaaaaaaaaaaaaaaaaaaaaaaaaaaaaaaaaaaaaaaaaaaaaaaaaaaaaaaaaaaaaaaaaaaaaaaaaaagaauu

SEQ ID NO: 9724 - RNA, 1301 nt, Artificial Sequence
  mRNA Design i-3 (hSL-A100-N5) comprising derived and/or modified sequence from Pf(3D7)__XP_001351122.1__HsALB_Pf-CSP(19-272)_L(AAY)_Pf-CSP(310-3 27)_L(AAY)_Pf-CSP(346-375)_L(AAY)_PADRE_L(AAY)_P2 (opt3)
aggagaaagcuuaccaugaagugggugaccuucaucagccugcucuuucuuuucuccucugccuacucacuguuucaggaguaucaaugcuacggcaguagcuccaacacaagagucuugaaugaauuaaacuaugacaaugcugggacuaaccuguacaaugagcuagaaaugaacuauuacggaaaacaggagaauugguauucucucaagaaaaacucgaggucacugggugaaaaugaugacggcaacaaugaggauaacgagaaacuucggaagcccaagcacaagaaacugaagcagccugcagacgggaauccagauccgaacgccaaucccaacguugacccuaacgcgaauccaaacguggaucccaaugcuaacccuaauguagacccaaacgccaaucccaacgcaaauccuaacgccaauccaaacgcuaauccgaacgcaaaucccaacgccaacccuaaugcuaacccaaaugccaaccccaaugcgaacccuaaugcaaacccaaaugccaaccccaaugcuaacccgaaugccaacccuaaugcaaaccccaacgcuaauccaaacgccaauccuaacgcgaaucccaacguggauccaaaugccaaccccaaugcaaacccuaaugcuaacccaaaugccaacccgaaugcuaaccccaacgccaauccuaacgcaaauccaaacgccaaucccaacgcuaauccuaacgcgaauccaaacgcaaaucccaacgccaauccgaacgcuaauccuaacgccaauccaaacgcaaaccccaaugccaacccuaaugcuaaccccaaugccaacccagcagcguacgaaccuagcgacaaacauauuaaggaguacuugaauaaaauacagaacagucucgcugccuauaucaagcccggauccgcaaauaagccaaaagaugaacuggacuacgccaacgauauugagaagaaaaucuguaagauggagaaaugcucugcugccuaugcaaaguucgucgcugccuggacgcugaaagcggccgcugcagccuaccaauauauuaaggcuaauagcaaguuuaucggcauaaccgaacucugaggacuaguuauaagacugacuagcccgaugggccucccaacgggcccuccuccccuccuugcaccgagauuaaucaaaggcucuuuucagagccaccaaaaaaaaaaaaaaaaaaaaaaaaaaaaaaaaaaaaaaaaaaaaaaaaaaaaaaaaaaaaaaaaaaaaaaaaaaaaaaaaaaaaaaaaaaaaaaaaaaaaagaauu

SEQ ID NO: 9725 - RNA, 1265 nt, Artificial Sequence
  mRNA Design i-3 (hSL-A100-N5) comprising derived and/or modified sequence from Pf(3D7)__XP_001351122.1__HsALB_Pf-CSP(19-272)_L(AAY)_Pf-CSP(310-3 27)_Linker (AAY)_Pf-CSP(346-397) (opt3)
aggagaaagcuuaccaugaagugggugaccuucaucagccugcucuuucuuuucuccucugccuacucacuguuucaggaguaucaaugcuacggcaguagcuccaacacaagagucuugaaugaauuaaacuaugacaaugcugggacuaaccuguacaaugagcuagaaaugaacuauuacggaaaacaggagaauugguauucucucaagaaaaacucgaggucacugggugaaaaugaugacggcaacaaugaggauaacgagaaguuacggaaacccaagcacaagaaacugaagcagccugcagacgggaauccagauccgaacgccaaucccaacguugacccuaacgcgaauccaaacguggaucccaaugcuaacccuaauguagacccaaacgccaaucccaacgcaaauccuaacgccaauccaaacgcuaauccgaacgcaaaucccaacgccaacccuaaugcuaacccaaaugccaaccccaaugcgaacccuaaugcaaacccaaaugccaaccccaaugcuaacccgaaugccaacccuaaugcaaaccccaacgcuaauccaaacgccaauccuaacgcgaaucccaacguggauccaaaugccaaccccaaugcaaacccuaaugcuaacccaaaugccaacccgaaugcuaaccccaacgccaauccuaacgcaaauccaaacgccaaucccaacgcuaauccuaacgcgaauccaaacgcaaaucccaacgccaauccgaacgcuaauccuaacgccaauccaaacgcaaaccccaaugccaacccuaaugcuaaccccaaugccaacccagcagcguacgaaccuagcgacaaacauauuaaggaguacuugaauaaaauacagaacagucucgcugccuauaucaagcccggauccgcaaauaagccaaaagaugaacuggacuacgccaacgauauugagaagaaaaucuguaagauggagaaaugcucuagcgucuucaaugugguuaacuccucaauuggccugaucauggugcucaguuuucuuuuccugaauugaggacuaguuauaagacugacuagcccgaugggccucccaacgggcccuccuccccuccuugcaccgagauuaaucaaaggcucuuuucagagccaccaaaaaaaaaaaaaaaaaaaaaaaaaaaaaaaaaaaaaaaaaaaaaaaaaaaaaaaaaaaaaaaaaaaaaaaaaaaaaaaaaaaaaaaaaaaaaaaaaaaaagaauu

SEQ ID NO: 9726 - RNA, 1865 nt, Artificial Sequence
  mRNA Design i-3 (hSL-A100-N5) comprising derived and/or modified sequence from Pf(3D7)__XP_001351122.1__LumSynt_L(GGS4-GGG)_Pf-CSP(19-397) (opt4)
aggagaaagcuuaccaugcagaucuacgagggcaagcugaccgccgagggccugagauucggcaucguggccagcagauucaaccacgcccugguggacagacugguggagggcgccaucgacgccaucgugagacacggcggcagagaggaggacaucacccuggugagagugcccggcagcugggagauccccguggccgccggcgagcuggccagaaaggaggacaucgacgccgugaucgccaucggcgugcugaucagaggcgccaccccccacuucgacuacaucgccagcgaggugagcaagggccuggccgaccugagccuggagcugagaaagcccaucaccuucggcgugaucaccgccgacacccuggagcaggccaucgagagagccggcaccaagcacggcaacaagggcugggaggccgcccugagcgccaucgagauggccaaccuguucaagagccugagaggcggcagcggcggcagcggcggcagcggcggcagcggcggcggccuguuccaggaguaccagugcuacggcagcagcagcaacaccagagugcugaacgagcugaacuacgacaacgccggcaccaaccuguacaacgagcuggagaugaacuacuacggcaagcaggagaacugguacagccugaagaagaacagcagaagccugggcgagaacgacgacggcaacaacgaggacaacgagaagcugagaaagcccaagcacaagaagcugaagcagcccgccgacggcaaccccgaccccaacgccaaccccaacguggaccccaacgccaaccccaacguggaccccaacgccaaccccaacguggaccccaacgccaaccccaacgccaaccccaacgccaaccccaacgccaaccccaacgccaaccccaacgccaaccccaacgccaaccccaacgccaaccccaacgccaaccccaacgccaaccccaacgccaaccccaacgccaaccccaacgccaaccccaacgccaaccccaacgccaaccccaacgccaaccccaacgccaaccccaacguggaccccaacgccaaccccaacgccaaccccaacgccaaccccaacgccaaccccaacgccaaccccaacgccaaccccaacgccaaccccaacgccaaccccaacgccaaccccaacgccaaccccaacgccaaccccaacgccaaccccaacgccaaccccaacgccaaccccaacgccaaccccaacgccaaccccaacgccaaccccaacgccaaccccaacaagaacaaccagggcaacggccagggccacaacaugcccaacgaccccaacagaaacguggacgagaacgccaacgccaacagcgccgugaagaacaacaacaacgaggagcccagcgacaagcacaucaaggaguaccugaacaagauccagaacagccugagcaccgaguggagccccugcagcgugaccugcggcaacggcauccaggugagaaucaagcccggcagcgccaacaagcccaaggacgagcuggacuacgccaacgacaucgagaagaagaucugcaagauggagaagugcagcagcguguucaacguggugaacagcagcaucggccugaucauggugcugagcuuccuguuccugaacugaggacuaguuauaagacugacuagcccgaugggccucccaacgggcccuccuccccuccuugcaccgagauuaaucaaaggcucuuuucagagccaccaaaaaaaaaaaaaaaaaaaaaaaaaaaaaaaaaaaaaaaaaaaaaaaaaaaaaaaaaaaaaaaaaaaaaaaaaaaaaaaaaaaaaaaaaaaaaaaaaaaaagaauu

SEQ ID NO: 9727 - RNA, 1727 nt, Artificial Sequence
  mRNA Design i-3 (hSL-A100-N5) comprising derived and/or modified sequence from Pf(3D7)__XP_001351122.1__HsALB_Pf-CSP(19-272)_L(PVTN)_HBsAg (opt4)
aggagaaagcuuaccaugaagugggugaccuucaucagccugcuguuccuguucagcagcgccuacagccuguuccaggaguaccagugcuacggcagcagcagcaacaccagagugcugaacgagcugaacuacgacaacgccggcaccaaccuguacaacgagcuggagaugaacuacuacggcaagcaggagaacugguacagccugaagaagaacagcagaagccugggcgagaacgacgacggcaacaacgaggacaacgagaagcugagaaagcccaagcacaagaagcugaagcagcccgccgacggcaaccccgaccccaacgccaaccccaacguggaccccaacgccaaccccaacguggaccccaacgccaaccccaacguggaccccaacgccaaccccaacgccaaccccaacgccaaccccaacgccaaccccaacgccaaccccaacgccaaccccaacgccaaccccaacgccaaccccaacgccaaccccaacgccaaccccaacgccaaccccaacgccaaccccaacgccaaccccaacgccaaccccaacgccaaccccaacgccaaccccaacgccaaccccaacguggaccccaacgccaaccccaacgccaaccccaacgccaaccccaacgccaaccccaacgccaaccccaacgccaaccccaacgccaaccccaacgccaaccccaacgccaaccccaacgccaaccccaacgccaaccccaacgccaaccccaacgccaaccccaacgccaaccccaacgccaaccccaacgccaaccccaacgccaaccccaacgccaacccccccgugaccaacauggagaacaucaccagcggcuuccugggcccccugcuggugcugcaggccggcuucuuccugcugaccagaauccugaccaucccccagagccuggacagcugguggaccagccugaacuuccugggcggcagccccgugugccugggccagaacagccagagccccaccagcaaccacagccccaccagcugcccccccaucugccccggcuacagauggaugugccugagaagauucaucaucuuccuguucauccugcugcugugccugaucuuccugcuggugcugcuggacuaccagggcaugcugcccgugugcccccugauccccggcagcaccaccaccaacaccggccccugcaagaccugcaccacccccgcccagggcaacagcauguuccccagcugcugcugcaccaagcccaccgacggcaacugcaccugcauccccauccccagcagcugggccuucgccaaguaccugugggagugggccagcgugagauucagcuggcugagccugcuggugcccuucgugcagugguucgugggccugagccccaccguguggcugagcgccaucuggaugaugugguacuggggccccagccuguacagcaucgugagccccuucaucccccugcugcccaucuucuucugccuguggguguacaucugaggacuaguuauaagacugacuagcccgaugggccucccaacgggcccuccuccccuccuugcaccgagauuaaucaaaggcucuuuucagagccaccaaaaaaaaaaaaaaaaaaaaaaaaaaaaaaaaaaaaaaaaaaaaaaaaaaaaaaaaaaaaaaaaaaaaaaaaaaaaaaaaaaaaaaaaaaaaaaaaaaaaagaauu

SEQ ID NO: 9728 - RNA, 1844 nt, Artificial Sequence
  mRNA Design i-3 (hSL-A100-N5) comprising derived and/or modified sequence from Pf(3D7)__XP_001351122.1__HsALB_Pf-CSP(19-272)_L(AAY)_Pf-CSP(346-3 65)_L(AAY)_PADRE_L(PVTN)_HBsAg (opt4)
aggagaaagcuuaccaugaagugggugaccuucaucagccugcuguuccuguucagcagcgccuacagccuguuccaggaguaccagugcuacggcagcagcagcaacaccagagugcugaacgagcugaacuacgacaacgccggcaccaaccuguacaacgagcuggagaugaacuacuacggcaagcaggagaacugguacagccugaagaagaacagcagaagccugggcgagaacgacgacggcaacaacgaggacaacgagaagcugagaaagcccaagcacaagaagcugaagcagcccgccgacggcaaccccgaccccaacgccaaccccaacguggaccccaacgccaaccccaacguggaccccaacgccaaccccaacguggaccccaacgccaaccccaacgccaaccccaacgccaaccccaacgccaaccccaacgccaaccccaacgccaaccccaacgccaaccccaacgccaaccccaacgccaaccccaacgccaaccccaacgccaaccccaacgccaaccccaacgccaaccccaacgccaaccccaacgccaaccccaacgccaaccccaacgccaaccccaacguggaccccaacgccaaccccaacgccaaccccaacgccaaccccaacgccaaccccaacgccaaccccaacgccaaccccaacgccaaccccaacgccaaccccaacgccaaccccaacgccaaccccaacgccaaccccaacgccaaccccaacgccaaccccaacgccaaccccaacgccaaccccaacgccaaccccaacgccaaccccaacgccaaccccgccgccuacaucaagcccggcagcgccaacaagcccaaggacgagcuggacuacgccaacgacaucgaggccgccuacgccaaguucguggccgccuggacccugaaggccgccgcccccgugaccaacauggagaacaucaccagcggcuuccugggcccccugcuggugcugcaggccggcuucuuccugcugaccagaauccugaccaucccccagagccuggacagcugguggaccagccugaacuuccugggcggcagccccgugugccugggccagaacagccagagccccaccagcaaccacagccccaccagcugcccccccaucugccccggcuacagauggaugugccugagaagauucaucaucuuccuguucauccugcugcugugccugaucuuccugcuggugcugcuggacuaccagggcaugcugcccgugugcccccugauccccggcagcaccaccaccaacaccggccccugcaagaccugcaccacccccgcccagggcaacagcauguuccccagcugcugcugcaccaagcccaccgacggcaacugcaccugcauccccauccccagcagcugggccuucgccaaguaccugugggagugggccagcgugagauucagcuggcugagccugcuggugcccuucgugcagugguucgugggccugagccccaccguguggcugagcgccaucuggaugaugugguacuggggccccagccuguacagcaucgugagccccuucaucccccugcugcccaucuucuucugccuguggguguacaucugaggacuaguuauaagacugacuagcccgaugggccucccaacgggcccuccuccccuccuugcaccgagauuaaucaaaggcucuuuucagagccaccaaaaaaaaaaaaaaaaaaaaaaaaaaaaaaaaaaaaaaaaaaaaaaaaaaaaaaaaaaaaaaaaaaaaaaaaaaaaaaaaaaaaaaaaaaaaaaaaaaaaagaauu

SEQ ID NO: 9729 - RNA, 2063 nt, Artificial Sequence
  mRNA Design i-3 (hSL-A100-N5) comprising derived and/or modified sequence from Pf(3D7)__XP_001351122.1__HsALB_Pf-CSP(19-384)_L(PVTN)_HBsAg (opt4)
aggagaaagcuuaccaugaagugggugaccuucaucagccugcuguuccuguucagcagcgccuacagccuguuccaggaguaccagugcuacggcagcagcagcaacaccagagugcugaacgagcugaacuacgacaacgccggcaccaaccuguacaacgagcuggagaugaacuacuacggcaagcaggagaacugguacagccugaagaagaacagcagaagccugggcgagaacgacgacggcaacaacgaggacaacgagaagcugagaaagcccaagcacaagaagcugaagcagcccgccgacggcaaccccgaccccaacgccaaccccaacguggaccccaacgccaaccccaacguggaccccaacgccaaccccaacguggaccccaacgccaaccccaacgccaaccccaacgccaaccccaacgccaaccccaacgccaaccccaacgccaaccccaacgccaaccccaacgccaaccccaacgccaaccccaacgccaaccccaacgccaaccccaacgccaaccccaacgccaaccccaacgccaaccccaacgccaaccccaacgccaaccccaacgccaaccccaacguggaccccaacgccaaccccaacgccaaccccaacgccaaccccaacgccaaccccaacgccaaccccaacgccaaccccaacgccaaccccaacgccaaccccaacgccaaccccaacgccaaccccaacgccaaccccaacgccaaccccaacgccaaccccaacgccaaccccaacgccaaccccaacgccaaccccaacgccaaccccaacgccaaccccaacaagaacaaccagggcaacggccagggccacaacaugcccaacgaccccaacagaaacguggacgagaacgccaacgccaacagcgccgugaagaacaacaacaacgaggagcccagcgacaagcacaucaaggaguaccugaacaagauccagaacagccugagcaccgaguggagccccugcagcgugaccugcggcaacggcauccaggugagaaucaagcccggcagcgccaacaagcccaaggacgagcuggacuacgccaacgacaucgagaagaagaucugcaagauggagaagugcagcagcguguucaacguggugaacagcagccccgugaccaacauggagaacaucaccagcggcuuccugggcccccugcuggugcugcaggccggcuucuuccugcugaccagaauccugaccaucccccagagccuggacagcugguggaccagccugaacuuccugggcggcagccccgugugccugggccagaacagccagagccccaccagcaaccacagccccaccagcugcccccccaucugccccggcuacagauggaugugccugagaagauucaucaucuuccuguucauccugcugcugugccugaucuuccugcuggugcugcuggacuaccagggcaugcugcccgugugcccccugauccccggcagcaccaccaccaacaccggccccugcaagaccugcaccacccccgcccagggcaacagcauguuccccagcugcugcugcaccaagcccaccgacggcaacugcaccugcauccccauccccagcagcugggccuucgccaaguaccugugggagugggccagcgugagauucagcuggcugagccugcuggugcccuucgugcagugguucgugggccugagccccaccguguggcugagcgccaucuggaugaugugguacuggggccccagccuguacagcaucgugagccccuucaucccccugcugcccaucuucuucugccuguggguguacaucugaggacuaguuauaagacugacuagcccgaugggccucccaacgggcccuccuccccuccuugcaccgagauuaaucaaaggcucuuuucagagccaccaaaaaaaaaaaaaaaaaaaaaaaaaaaaaaaaaaaaaaaaaaaaaaaaaaaaaaaaaaaaaaaaaaaaaaaaaaaaaaaaaaaaaaaaaaaaaaaaaaaaagaauu

SEQ ID NO: 9730 - RNA, 1880 nt, Artificial Sequence
  mRNA Design i-3 (hSL-A100-N5) comprising derived and/or modified sequence from Pf(3D7)__XP_001351122.1__HsALB_Pf-CSP(19-384)_L(SGG)_Ferritin (opt4)
aggagaaagcuuaccaugaagugggugaccuucaucagccugcuguuccuguucagcagcgccuacagccuguuccaggaguaccagugcuacggcagcagcagcaacaccagagugcugaacgagcugaacuacgacaacgccggcaccaaccuguacaacgagcuggagaugaacuacuacggcaagcaggagaacugguacagccugaagaagaacagcagaagccugggcgagaacgacgacggcaacaacgaggacaacgagaagcugagaaagcccaagcacaagaagcugaagcagcccgccgacggcaaccccgaccccaacgccaaccccaacguggaccccaacgccaaccccaacguggaccccaacgccaaccccaacguggaccccaacgccaaccccaacgccaaccccaacgccaaccccaacgccaaccccaacgccaaccccaacgccaaccccaacgccaaccccaacgccaaccccaacgccaaccccaacgccaaccccaacgccaaccccaacgccaaccccaacgccaaccccaacgccaaccccaacgccaaccccaacgccaaccccaacgccaaccccaacguggaccccaacgccaaccccaacgccaaccccaacgccaaccccaacgccaaccccaacgccaaccccaacgccaaccccaacgccaaccccaacgccaaccccaacgccaaccccaacgccaaccccaacgccaaccccaacgccaaccccaacgccaaccccaacgccaaccccaacgccaaccccaacgccaaccccaacgccaaccccaacgccaaccccaacaagaacaaccagggcaacggccagggccacaacaugcccaacgaccccaacagaaacguggacgagaacgccaacgccaacagcgccgugaagaacaacaacaacgaggagcccagcgacaagcacaucaaggaguaccugaacaagauccagaacagccugagcaccgaguggagccccugcagcgugaccugcggcaacggcauccaggugagaaucaagcccggcagcgccaacaagcccaaggacgagcuggacuacgccaacgacaucgagaagaagaucugcaagauggagaagugcagcagcguguucaacguggugaacagcagcagcggcggccugagcaaggacaucaucaagcugcugaacgagcaggugaacaaggagaugaacagcagcaaccuguacaugagcaugagcagcuggugcuacacccacagccuggacggcgccggccuguuccuguucgaccacgccgccgaggaguacgagcacgccaagaagcugaucaucuuccugaacgagaacaacgugcccgugcagcugaccagcaucagcgcccccgagcacaaguucgagggccugacccagaucuuccagaaggccuacgagcacgagcagcacaucagcgagagcaucaacaacaucguggaccacgccaucaagagcaaggaccacgccaccuucaacuuccugcagugguacguggccgagcagcacgaggaggaggugcuguucaaggacauccuggacaagaucgagcugaucggcaacgagaaccacggccuguaccuggccgaccaguacgugaagggcaucgccaagagcagaaagagcugaggacuaguuauaagacugacuagcccgaugggccucccaacgggcccuccuccccuccuugcaccgagauuaaucaaaggcucuuuucagagccaccaaaaaaaaaaaaaaaaaaaaaaaaaaaaaaaaaaaaaaaaaaaaaaaaaaaaaaaaaaaaaaaaaaaaaaaaaaaaaaaaaaaaaaaaaaaaaaaaaaaaagaauu

SEQ ID NO: 9731 - RNA, 1841 nt, Artificial Sequence
  mRNA Design i-3 (hSL-A100-N5) comprising derived and/or modified sequence from Pf(3D7)__XP_001351122.1__HsALB_Pf-CSP(93-384)_L(PVTN)_HBsAg (opt4)
aggagaaagcuuaccaugaagugggugaccuucaucagccugcuguuccuguucagcagcgccuacagcaagcugaagcagcccgccgacggcaaccccgaccccaacgccaaccccaacguggaccccaacgccaaccccaacguggaccccaacgccaaccccaacguggaccccaacgccaaccccaacgccaaccccaacgccaaccccaacgccaaccccaacgccaaccccaacgccaaccccaacgccaaccccaacgccaaccccaacgccaaccccaacgccaaccccaacgccaaccccaacgccaaccccaacgccaaccccaacgccaaccccaacgccaaccccaacgccaaccccaacgccaaccccaacguggaccccaacgccaaccccaacgccaaccccaacgccaaccccaacgccaaccccaacgccaaccccaacgccaaccccaacgccaaccccaacgccaaccccaacgccaaccccaacgccaaccccaacgccaaccccaacgccaaccccaacgccaaccccaacgccaaccccaacgccaaccccaacgccaaccccaacgccaaccccaacgccaaccccaacaagaacaaccagggcaacggccagggccacaacaugcccaacgaccccaacagaaacguggacgagaacgccaacgccaacagcgccgugaagaacaacaacaacgaggagcccagcgacaagcacaucaaggaguaccugaacaagauccagaacagccugagcaccgaguggagccccugcagcgugaccugcggcaacggcauccaggugagaaucaagcccggcagcgccaacaagcccaaggacgagcuggacuacgccaacgacaucgagaagaagaucugcaagauggagaagugcagcagcguguucaacguggugaacagcagccccgugaccaacauggagaacaucaccagcggcuuccugggcccccugcuggugcugcaggccggcuucuuccugcugaccagaauccugaccaucccccagagccuggacagcugguggaccagccugaacuuccugggcggcagccccgugugccugggccagaacagccagagccccaccagcaaccacagccccaccagcugcccccccaucugccccggcuacagauggaugugccugagaagauucaucaucuuccuguucauccugcugcugugccugaucuuccugcuggugcugcuggacuaccagggcaugcugcccgugugcccccugauccccggcagcaccaccaccaacaccggccccugcaagaccugcaccacccccgcccagggcaacagcauguuccccagcugcugcugcaccaagcccaccgacggcaacugcaccugcauccccauccccagcagcugggccuucgccaaguaccugugggagugggccagcgugagauucagcuggcugagccugcuggugcccuucgugcagugguucgugggccugagccccaccguguggcugagcgccaucuggaugaugugguacuggggccccagccuguacagcaucgugagccccuucaucccccugcugcccaucuucuucugccuguggguguacaucugaggacuaguuauaagacugacuagcccgaugggccucccaacgggcccuccuccccuccuugcaccgagauuaaucaaaggcucuuuucagagccaccaaaaaaaaaaaaaaaaaaaaaaaaaaaaaaaaaaaaaaaaaaaaaaaaaaaaaaaaaaaaaaaaaaaaaaaaaaaaaaaaaaaaaaaaaaaaaaaaaaaaagaauu

SEQ ID NO: 9732 - RNA, 1502 nt, Artificial Sequence; identical to SEQ ID NO: 7922
  mRNA Design i-3 (hSL-A100-N5) comprising derived and/or modified sequence from Pf(3D7)__XP_001351122.1__HsALB_Pf-CSP(199-377)_L(PVTN)_HBsAg (opt4)

SEQ ID NO: 9733 - RNA, 1199 nt, Artificial Sequence
  mRNA Design i-3 (hSL-A100-N5) comprising derived and/or modified sequence from Pf(3D7)__XP_001351122.1__HsALB_Pf-CSP(19-272)_L(AAY)_Pf-CSP(346-3 75)_L(AAY)_Pf-CSP(310-327) (opt4)
aggagaaagcuuaccaugaagugggugaccuucaucagccugcuguuccuguucagcagcgccuacagccuguuccaggaguaccagugcuacggcagcagcagcaacaccagagugcugaacgagcugaacuacgacaacgccggcaccaaccuguacaacgagcuggagaugaacuacuacggcaagcaggagaacugguacagccugaagaagaacagcagaagccugggcgagaacgacgacggcaacaacgaggacaacgagaagcugagaaagcccaagcacaagaagcugaagcagcccgccgacggcaaccccgaccccaacgccaaccccaacguggaccccaacgccaaccccaacguggaccccaacgccaaccccaacguggaccccaacgccaaccccaacgccaaccccaacgccaaccccaacgccaaccccaacgccaaccccaacgccaaccccaacgccaaccccaacgccaaccccaacgccaaccccaacgccaaccccaacgccaaccccaacgccaaccccaacgccaaccccaacgccaaccccaacgccaaccccaacgccaaccccaacgccaaccccaacguggaccccaacgccaaccccaacgccaaccccaacgccaaccccaacgccaaccccaacgccaaccccaacgccaaccccaacgccaaccccaacgccaaccccaacgccaaccccaacgccaaccccaacgccaaccccaacgccaaccccaacgccaaccccaacgccaaccccaacgccaaccccaacgccaaccccaacgccaaccccaacgccaaccccgccgccuacaucaagcccggcagcgccaacaagcccaaggacgagcuggacuacgccaacgacaucgagaagaagaucugcaagauggagaagugcagcgccgccuacgagcccagcgacaagcacaucaaggaguaccugaacaagauccagaacagccugugaggacuaguuauaagacugacuagcccgaugggccucccaacgggcccuccuccccuccuugcaccgagauuaaucaaaggcucuuuucagagccaccaaaaaaaaaaaaaaaaaaaaaaaaaaaaaaaaaaaaaaaaaaaaaaaaaaaaaaaaaaaaaaaaaaaaaaaaaaaaaaaaaaaaaaaaaaaaaaaaaaaaagaauu

SEQ ID NO: 9734 - RNA, 1247 nt, Artificial Sequence
  mRNA Design i-3 (hSL-A100-N5) comprising derived and/or modified sequence from Pf(3D7)__XP_001351122.1__HsALB_Pf-CSP(19-272)_L(AAY)_Pf-CSP(346-3 75)_L(AAY)_Pf-CSP(310-327)_L(AAY)_PADRE (opt4)
aggagaaagcuuaccaugaagugggugaccuucaucagccugcuguuccuguucagcagcgccuacagccuguuccaggaguaccagugcuacggcagcagcagcaacaccagagugcugaacgagcugaacuacgacaacgccggcaccaaccuguacaacgagcuggagaugaacuacuacggcaagcaggagaacugguacagccugaagaagaacagcagaagccugggcgagaacgacgacggcaacaacgaggacaacgagaagcugagaaagcccaagcacaagaagcugaagcagcccgccgacggcaaccccgaccccaacgccaaccccaacguggaccccaacgccaaccccaacguggaccccaacgccaaccccaacguggaccccaacgccaaccccaacgccaaccccaacgccaaccccaacgccaaccccaacgccaaccccaacgccaaccccaacgccaaccccaacgccaaccccaacgccaaccccaacgccaaccccaacgccaaccccaacgccaaccccaacgccaaccccaacgccaaccccaacgccaaccccaacgccaaccccaacgccaaccccaacguggaccccaacgccaaccccaacgccaaccccaacgccaaccccaacgccaaccccaacgccaaccccaacgccaaccccaacgccaaccccaacgccaaccccaacgccaaccccaacgccaaccccaacgccaaccccaacgccaaccccaacgccaaccccaacgccaaccccaacgccaaccccaacgccaaccccaacgccaaccccaacgccaaccccgccgccuacaucaagcccggcagcgccaacaagcccaaggacgagcuggacuacgccaacgacaucgagaagaagaucugcaagauggagaagugcagcgccgccuacgagcccagcgacaagcacaucaaggaguaccugaacaagauccagaacagccuggccgccuacgccaaguucguggccgccuggacccugaaggccgccgccugaggacuaguuauaagacugacuagcccgaugggccucccaacgggcccuccuccccuccuugcaccgagauuaaucaaaggcucuuuucagagccaccaaaaaaaaaaaaaaaaaaaaaaaaaaaaaaaaaaaaaaaaaaaaaaaaaaaaaaaaaaaaaaaaaaaaaaaaaaaaaaaaaaaaaaaaaaaaaaaaaaaaagaauu

SEQ ID NO: 9735 - RNA, 1247 nt, Artificial Sequence
  mRNA Design i-3 (hSL-A100-N5) comprising derived and/or modified sequence from Pf(3D7)__XP_001351122.1__HsALB_Pf-CSP(19-272)_L(AAY)_Pf-CSP(310-3 27)_L(AAY)_Pf-CSP(346-375)_L(AAY)_PADRE (opt4)
aggagaaagcuuaccaugaagugggugaccuucaucagccugcuguuccuguucagcagcgccuacagccuguuccaggaguaccagugcuacggcagcagcagcaacaccagagugcugaacgagcugaacuacgacaacgccggcaccaaccuguacaacgagcuggagaugaacuacuacggcaagcaggagaacugguacagccugaagaagaacagcagaagccugggcgagaacgacgacggcaacaacgaggacaacgagaagcugagaaagcccaagcacaagaagcugaagcagcccgccgacggcaaccccgaccccaacgccaaccccaacguggaccccaacgccaaccccaacguggaccccaacgccaaccccaacguggaccccaacgccaaccccaacgccaaccccaacgccaaccccaacgccaaccccaacgccaaccccaacgccaaccccaacgccaaccccaacgccaaccccaacgccaaccccaacgccaaccccaacgccaaccccaacgccaaccccaacgccaaccccaacgccaaccccaacgccaaccccaacgccaaccccaacgccaaccccaacguggaccccaacgccaaccccaacgccaaccccaacgccaaccccaacgccaaccccaacgccaaccccaacgccaaccccaacgccaaccccaacgccaaccccaacgccaaccccaacgccaaccccaacgccaaccccaacgccaaccccaacgccaaccccaacgccaaccccaacgccaaccccaacgccaaccccaacgccaaccccaacgccaaccccgccgccuacgagcccagcgacaagcacaucaaggaguaccugaacaagauccagaacagccuggccgccuacaucaagcccggcagcgccaacaagcccaaggacgagcuggacuacgccaacgacaucgagaagaagaucugcaagauggagaagugcagcgccgccuacgccaaguucguggccgccuggacccugaaggccgccgccugaggacuaguuauaagacugacuagcccgaugggccucccaacgggcccuccuccccuccuugcaccgagauuaaucaaaggcucuuuucagagccaccaaaaaaaaaaaaaaaaaaaaaaaaaaaaaaaaaaaaaaaaaaaaaaaaaaaaaaaaaaaaaaaaaaaaaaaaaaaaaaaaaaaaaaaaaaaaaaaaaaaaagaauu

SEQ ID NO: 9736 - RNA, 1301 nt, Artificial Sequence
  mRNA Design i-3 (hSL-A100-N5) comprising derived and/or modified sequence from Pf(3D7)__XP_001351122.1__HsALB_Pf-CSP(19-272)_L(AAY)_Pf-CSP(310-3 27)_L(AAY)_Pf-CSP(346-375)_L(AAY)_PADRE_L(AAY)_P2 (opt4)
aggagaaagcuuaccaugaagugggugaccuucaucagccugcuguuccuguucagcagcgccuacagccuguuccaggaguaccagugcuacggcagcagcagcaacaccagagugcugaacgagcugaacuacgacaacgccggcaccaaccuguacaacgagcuggagaugaacuacuacggcaagcaggagaacugguacagccugaagaagaacagcagaagccugggcgagaacgacgacggcaacaacgaggacaacgagaagcugagaaagcccaagcacaagaagcugaagcagcccgccgacggcaaccccgaccccaacgccaaccccaacguggaccccaacgccaaccccaacguggaccccaacgccaaccccaacguggaccccaacgccaaccccaacgccaaccccaacgccaaccccaacgccaaccccaacgccaaccccaacgccaaccccaacgccaaccccaacgccaaccccaacgccaaccccaacgccaaccccaacgccaaccccaacgccaaccccaacgccaaccccaacgccaaccccaacgccaaccccaacgccaaccccaacgccaaccccaacguggaccccaacgccaaccccaacgccaaccccaacgccaaccccaacgccaaccccaacgccaaccccaacgccaaccccaacgccaaccccaacgccaaccccaacgccaaccccaacgccaaccccaacgccaaccccaacgccaaccccaacgccaaccccaacgccaaccccaacgccaaccccaacgccaaccccaacgccaaccccaacgccaaccccgccgccuacgagcccagcgacaagcacaucaaggaguaccugaacaagauccagaacagccuggccgccuacaucaagcccggcagcgccaacaagcccaaggacgagcuggacuacgccaacgacaucgagaagaagaucugcaagauggagaagugcagcgccgccuacgccaaguucguggccgccuggacccugaaggccgccgccgccgccuaccaguacaucaaggccaacagcaaguucaucggcaucaccgagcugugaggacuaguuauaagacugacuagcccgaugggccucccaacgggcccuccuccccuccuugcaccgagauuaaucaaaggcucuuuucagagccaccaaaaaaaaaaaaaaaaaaaaaaaaaaaaaaaaaaaaaaaaaaaaaaaaaaaaaaaaaaaaaaaaaaaaaaaaaaaaaaaaaaaaaaaaaaaaaaaaaaaaagaauu

SEQ ID NO: 9737 - RNA, 1265 nt, Artificial Sequence
  mRNA Design i-3 (hSL-A100-N5) comprising derived and/or modified sequence from Pf(3D7)__XP_001351122.1__HsALB_Pf-CSP(19-272)_L(AAY)_Pf-CSP(310-3 27)_Linker (AAY)_Pf-CSP(346-397) (opt4)
aggagaaagcuuaccaugaagugggugaccuucaucagccugcuguuccuguucagcagcgccuacagccuguuccaggaguaccagugcuacggcagcagcagcaacaccagagugcugaacgagcugaacuacgacaacgccggcaccaaccuguacaacgagcuggagaugaacuacuacggcaagcaggagaacugguacagccugaagaagaacagcagaagccugggcgagaacgacgacggcaacaacgaggacaacgagaagcugagaaagcccaagcacaagaagcugaagcagcccgccgacggcaaccccgaccccaacgccaaccccaacguggaccccaacgccaaccccaacguggaccccaacgccaaccccaacguggaccccaacgccaaccccaacgccaaccccaacgccaaccccaacgccaaccccaacgccaaccccaacgccaaccccaacgccaaccccaacgccaaccccaacgccaaccccaacgccaaccccaacgccaaccccaacgccaaccccaacgccaaccccaacgccaaccccaacgccaaccccaacgccaaccccaacgccaaccccaacguggaccccaacgccaaccccaacgccaaccccaacgccaaccccaacgccaaccccaacgccaaccccaacgccaaccccaacgccaaccccaacgccaaccccaacgccaaccccaacgccaaccccaacgccaaccccaacgccaaccccaacgccaaccccaacgccaaccccaacgccaaccccaacgccaaccccaacgccaaccccaacgccaaccccgccgccuacgagcccagcgacaagcacaucaaggaguaccugaacaagauccagaacagccuggccgccuacaucaagcccggcagcgccaacaagcccaaggacgagcuggacuacgccaacgacaucgagaagaagaucugcaagauggagaagugcagcagcguguucaacguggugaacagcagcaucggccugaucauggugcugagcuuccuguuccugaacugaggacuaguuauaagacugacuagcccgaugggccucccaacgggcccuccuccccuccuugcaccgagauuaaucaaaggcucuuuucagagccaccaaaaaaaaaaaaaaaaaaaaaaaaaaaaaaaaaaaaaaaaaaaaaaaaaaaaaaaaaaaaaaaaaaaaaaaaaaaaaaaaaaaaaaaaaaaaaaaaaaaaagaauu

SEQ ID NO: 9738 - RNA, 1865 nt, Artificial Sequence
  mRNA Design i-3 (hSL-A100-N5) comprising derived and/or modified sequence from Pf(3D7)__XP_001351122.1__LumSynt_L(GGS4-GGG)_Pf-CSP(19-397) (opt5)
aggagaaagcuuaccaugcagaucuacgagggcaagcugaccgccgaagggcucagauucggaauuguggcuagccgguuuaaccacgcccuggucgaccgccuuguugagggcgcgaucgaugcuauugugagacaugggggacgggaagaggacaucacacuggugcgcguccccggcuccugggaaauuccuguggccgccggggagcucgcuagaaaagaggauaucgacgccguuaucgcuauuggagugcugauccggggcgccacgccgcacuucgauuauauugcgucugaagucagcaagggccuugccgaccugucccucgagcugcgcaaacccaucaccuuuggggugauuacagcugauacccuggaacaagccaucgagagagcuggaacaaagcauggcaauaaagggugggaggccgcgcucucugccauugaaauggcuaaccuguucaagagccuucggggaggcuccgggggaucuggcggcagcgggggauccggcgggggacuguuucaggaguaccagugcuauggcuccucuuccaauacccgcguucucaacgaacugaauuacgacaacgccgggacaaaucuuuauaacgagcuggaaaugaauuacuauggaaagcaggagaacugguacagccucaaaaagaacucuagaucccugggcgagaaugaugacggcaauaacgaagauaaugagaaacugcggaagccuaaacacaagaagcucaaacaacccgcugacgggaacccugaucccaacgccaauccuaacguggacccgaaugccaaccccaaugucgacccuaacgcuaaucccaacguggauccuaaugcgaaccccaaugccaacccgaaugcuaacccuaaugccaaccccaacgccaauccuaacgcuaaucccaacgccaaucccaacgcgaauccuaacgcuaauccgaacgccaaucccaacgccaauccuaacgcuaaucccaacgccaacccuaaugcuaaccccaaugccaacccgaaugcgaacccuaaugccaaccccaauguggacccuaacgcuaaucccaacgccaauccuaacgcuaaucccaacgccaacccgaaugcgaacccuaaugccaaccccaaugcuaaccccaaugccaacccuaaugcuaacccgaaugccaaccccaaugccaacccuaaugcuaaccccaaugcgaacccuaacgccaaucccaacgcuaauccuaacgccaaucccaacgccaauccgaacgcuaauccuaacaagaauaaccagggaaauggccaggggcauaacaugcccaaugauccuaaccgcaacgucgacgaaaaugccaacgcgaauagcgcuguuaaaaacaauaacaaugaggaacccucugauaagcacaucaaagaguaccugaacaagauccagaauagccuuagcaccgagugguccccguguucugugacgugcggaaacggcauucaagugagaaucaaaccugggagcgccaauaagcccaaggacgaacuggauuaugccaacgacauugagaaaaagaucuguaaaauggaaaagugcuccagcgucuucaaugugguuaacucuuccauuggccucaucauggugcugagcuuucuuuuccugaauugaggacuaguuauaagacugacuagcccgaugggccucccaacgggcccuccuccccuccuugcaccgagauuaaucaaaggcucuuuucagagccaccaaaaaaaaaaaaaaaaaaaaaaaaaaaaaaaaaaaaaaaaaaaaaaaaaaaaaaaaaaaaaaaaaaaaaaaaaaaaaaaaaaaaaaaaaaaaaaaaaaaaagaauu

SEQ ID NO: 9739 - RNA, 1727 nt, Artificial Sequence
  mRNA Design i-3 (hSL-A100-N5) comprising derived and/or modified sequence from Pf(3D7)__XP_001351122.1__HsALB_Pf-CSP(19-272)_L(PVTN)_HBsAg (opt5)
aggagaaagcuuaccaugaagugggugaccuucaucagccugcucuuucuguucuccucugccuacagccuuuuucaggaguaucaaugcuacggcuccucuagcaacacaagaguccugaaugaacucaacuaugacaaugcugggacgaaccuguacaaugagcuugaaaugaacuauuacggaaaacaggagaauugguauucccugaagaaaaacucucggagccucggcgaaaaugaugacgggaacaaugaggauaacgagaagcugcgcaaacccaagcacaagaaacugaagcagccugccgacggaaauccggaucccaacgcgaauccuaacguugaccccaacgcuaauccuaacguggaucccaaugccaacccuaauguggacccgaacgccaaucccaacgcuaauccuaacgccaaucccaacgcuaauccuaacgccaaucccaacgcgaacccgaaugccaacccuaaugcuaaccccaaugccaacccuaaugcuaaccccaaugccaaccccaaugcgaacccuaaugccaacccgaaugcuaaccccaacgccaauccuaacgcuaaucccaacgccaauccuaacgucgaucccaaugccaacccgaaugcuaacccuaaugcgaaccccaaugccaacccuaaugcuaaccccaacgccaauccuaacgccaaucccaacgcuaauccgaacgccaauccuaacgcgaaucccaacgcuaaucccaacgccaauccuaacgccaauccgaacgcuaaucccaacgccaacccuaaugcuaaccccaaugccaacccuaaugcgaaucccccugugaccaacauggaaaacauuacauccggcuuccucgggccccugcuuguucugcaggccggauuuuuccuccugaccagaauccuuacaauuccgcaaagccuggacucuugguggaccucccucaauuuucugggcggcagcccugugugucuggggcagaacucucagucccccacaagcaaucauucuccuaccuccugucccccgaucugcccuggauaccgguggaugugccuccgcagauucauuaucuuucuguucauccuucugcucugucugauuuuucuucugguccuccuggauuaccagggcaugcugcccgugugcccucucauccccgggagcacgaccacaaacaccggacccuguaaaacaugcaccacgccugcucaaggcaauuccauguucccgucuuguugcuguacaaagcccaccgacgggaacugcacaugcauuccuauccccagcuccugggccuuugcuaaauaucugugggagugggccagcguucgguucucuuggcuuucccugcucgugccuuucguccagugguuugugggacugagccccaccguguggcuuucugcgauuuggaugaugugguacuggggcccuagccuguauuccaucgucucuccguucauuccccuccugccuaucuuuuucugucuguggguuuacaucugaggacuaguuauaagacugacuagcccgaugggccucccaacgggcccuccuccccuccuugcaccgagauuaaucaaaggcucuuuucagagccaccaaaaaaaaaaaaaaaaaaaaaaaaaaaaaaaaaaaaaaaaaaaaaaaaaaaaaaaaaaaaaaaaaaaaaaaaaaaaaaaaaaaaaaaaaaaaaaaaaaaaagaauu

SEQ ID NO: 9740 - RNA, 1844 nt, Artificial Sequence
  mRNA Design i-3 (hSL-A100-N5) comprising derived and/or modified sequence from Pf(3D7)__XP_001351122.1__HsALB_Pf-CSP(19-272)_L(AAY)_Pf-CSP(346-3 65)_L(AAY)_PADRE_L(PVTN)_HBsAg (opt5)
aggagaaagcuuaccaugaagugggugaccuucaucagccugcucuuucuguucuccucugccuacagccuuuuucaggaguaucaaugcuacggcuccucuagcaacacaagaguccugaaugaacucaacuaugacaaugcugggacgaaccuguacaaugagcuugaaaugaacuauuacggaaaacaggagaauugguauucccugaagaaaaacucucggagccucggcgaaaaugaugacgggaacaaugaggauaacgagaagcugcgcaaacccaagcacaagaaacugaagcagccugccgacggaaauccggaucccaacgcgaauccuaacguugaccccaacgcuaauccuaacguggaucccaaugccaacccuaauguggacccgaacgccaaucccaacgcuaauccuaacgccaaucccaacgcuaauccuaacgccaaucccaacgcgaacccgaaugccaacccuaaugcuaaccccaaugccaacccuaaugcuaaccccaaugccaaccccaaugcgaacccuaaugccaacccgaaugcuaaccccaacgccaauccuaacgcuaaucccaacgccaauccuaacgucgaucccaaugccaacccgaaugcuaacccuaaugcgaaccccaaugccaacccuaaugcuaaccccaacgccaauccuaacgccaaucccaacgcuaauccgaacgccaauccuaacgcgaaucccaacgcuaaucccaacgccaauccuaacgccaauccgaacgcuaaucccaacgccaacccuaaugcuaaccccaaugccaacccuaaugcgaaccccgccgcuuacauuaaaccuggcuccgccaauaagcccaaagacgaacucgauuacgcuaacgacaucgaggccgcguaugccaaguucguggcugccuggacccugaaggcugccgccccgguuacaaauauggaaaacauuaccagcggguuucuuggaccucugcucgugcugcaggcuggcuucuuucuucugacaagaauccucaccauuccccaaucucuggauuccugguggacaagccugaauuuccucggcgggucuccugucugucugggacagaacucccagagccccaccucuaaucauuccccgacgagcugcccucccaucuguccuggcuaccgguggaugugccuucgcagauuuaucauuuuccuguuuauccuccugcuuugucugauuuuccuccuggugcugcucgacuaucaggggaugcugcccguuugcccccuuaucccuggauccaccacaaccaacacaggcccguguaaaaccugcacgacacccgcgcaaggaaauucuauguuuccuagcuguugcuguaccaagcccacagacgggaacuguaccugcauuccuauccccuccagcugggccuucgcuaaauaccugugggagugggccucugugcgguucuccuggcucagccugcuugucccuuuugugcagugguucgugggccugucuccgaccgucuggcucagcgccauuuggaugaugugguauuggggccccucccuguacucuaucguuagcccuuuuaucccccugcucccuauuuucuuuugccuguggguguauaucugaggacuaguuauaagacugacuagcccgaugggccucccaacgggcccuccuccccuccuugcaccgagauuaaucaaaggcucuuuucagagccaccaaaaaaaaaaaaaaaaaaaaaaaaaaaaaaaaaaaaaaaaaaaaaaaaaaaaaaaaaaaaaaaaaaaaaaaaaaaaaaaaaaaaaaaaaaaaaaaaaaaaagaauu

SEQ ID NO: 9741 - RNA, 2063 nt, Artificial Sequence
  mRNA Design i-3 (hSL-A100-N5) comprising derived and/or modified sequence from Pf(3D7)__XP_001351122.1__HsALB_Pf-CSP(19-384)_L(PVTN)_HBsAg (opt5)
aggagaaagcuuaccaugaagugggugaccuucaucagccugcucuuucuguucuccucugccuacagccuuuuucaggaguaucaaugcuacggcuccucuagcaacacaagaguccugaaugaacucaacuaugacaaugcugggacgaaccuguacaaugagcuugaaaugaacuauuacggaaaacaggagaauugguauucccugaagaaaaacucucggagccucggcgaaaaugaugacgggaacaaugaggauaacgagaagcugcgcaaacccaagcacaagaaacugaagcagccugccgacggaaauccggaucccaacgcgaauccuaacguugaccccaacgcuaauccuaacguggaucccaaugccaacccuaauguggacccgaacgccaaucccaacgcuaauccuaacgccaaucccaacgcuaauccuaacgccaaucccaacgcgaacccgaaugccaacccuaaugcuaaccccaaugccaacccuaaugcuaaccccaaugccaaccccaaugcgaacccuaaugccaacccgaaugcuaaccccaacgccaauccuaacgcuaaucccaacgccaauccuaacgucgaucccaaugccaacccgaaugcuaacccuaaugcgaaccccaaugccaacccuaaugcuaaccccaacgccaauccuaacgccaaucccaacgcuaauccgaacgccaauccuaacgcgaaucccaacgcuaaucccaacgccaauccuaacgccaauccgaacgcuaaucccaacgccaacccuaaugcuaaccccaaugccaacccuaaugcgaaccccaauaaaaacaaucagggcaacgggcaaggacauaauaugccuaacgaccccaauagaaacguggaugaaaaugccaacgcuaacuccgccguuaagaauaacaauaacgaggaaccgagcgacaaacacauuaaggaguaccucaauaagauccagaacucucuguccaccgaguggagcccuuguucugugacaugcggcaauggcauucagguccggaucaaacccggguccgcuaacaagccuaaagaugaacuugacuacgccaaugacauugagaagaaaaucuguaagauggaaaaaugcagcucuguguucaacguugucaauuccagccccgugaccaacauggagaauaucacauccggauuucugggcccgcuccuggugcuucaggcgggguucuuucugcucacccgcauucugacaaucccucaaucucuggauagcugguggaccucccucaacuuccugggaggcagccccgugugucuugggcaaaauucucaguccccuacgagcaaccauucucccaccagcugucccccuauuugcccgggauauagauggaugugccugcggcgcuuuaucauuuuccucuuuauccugcuucugugucucauuuuccugcugguccuccuggacuaccagggcaugcuucccguuugcccucugauccccggcuccacaaccacaaacaccgggccuuguaagacgugcacaacccccgcccagggaaauucuauguuuccuagcugcuguugcacaaagccgaccgauggcaacuguaccugcauccccauuccuuccagcugggcuuucgccaaauaucucugggaaugggcuucugugagauucuccuggcugagccuucuggugcccuuuguccagugguucguggggcucucuccuacaguuuggcuguccgccaucuggaugaugugguacuggggacccagccuguauuccauugugucuccguuuaucccucuccugcccauuuucuuuugucuuugggucuacaucugaggacuaguuauaagacugacuagcccgaugggccucccaacgggcccuccuccccuccuugcaccgagauuaaucaaaggcucuuuucagagccaccaaaaaaaaaaaaaaaaaaaaaaaaaaaaaaaaaaaaaaaaaaaaaaaaaaaaaaaaaaaaaaaaaaaaaaaaaaaaaaaaaaaaaaaaaaaaaaaaaaaaagaauu

SEQ ID NO: 9742 - RNA, 1880 nt, Artificial Sequence
  mRNA Design i-3 (hSL-A100-N5) comprising derived and/or modified sequence from Pf(3D7)__XP_001351122.1__HsALB_Pf-CSP(19-384)_L(SGG)_Ferritin (opt5)
aggagaaagcuuaccaugaagugggugaccuucaucagccugcucuuucuguucuccucugccuacagccuuuuucaggaguaucaaugcuacggcuccucuagcaacacaagagugcugaaugaacucaacuaugacaaugcugggacgaaccuguacaaugagcuugaaaugaacuauuacggaaaacaggagaauugguauucccugaagaaaaacucucggagccucggcgaaaaugaugacgggaacaaugaggauaacgagaagcugcgcaaacccaagcacaagaaacugaagcagccugccgacggaaauccggaucccaacgcgaauccuaacguugaccccaacgcuaauccuaacguggaucccaaugccaacccuaauguggacccgaacgccaaucccaacgcuaauccuaacgccaaucccaacgcuaauccuaacgccaaucccaacgcgaacccgaaugccaacccuaaugcuaaccccaaugccaacccuaaugcuaaccccaaugccaaccccaaugcgaacccuaaugccaacccgaaugcuaaccccaacgccaauccuaacgcuaaucccaacgccaauccuaacgucgaucccaaugccaacccgaaugcuaacccuaaugcgaaccccaaugccaacccuaaugcuaaccccaacgccaauccuaacgccaaucccaacgcuaauccgaacgccaauccuaacgcgaaucccaacgcuaaucccaacgccaauccuaacgccaauccgaacgcuaaucccaacgccaacccuaaugcuaaccccaaugccaacccuaaugcgaaccccaauaaaaacaaucagggcaacgggcaaggacauaauaugccuaacgaccccaauagaaacguggaugaaaaugccaacgcuaacuccgccguuaagaauaacaauaacgaggaaccgagcgacaaacacauuaaggaguaccucaauaagauccagaacucucuguccaccgaguggagcccuuguucugugacaugcggcaauggcauucagguccggaucaaacccggguccgcuaacaagccuaaagaugaacuugacuacgccaaugacauugagaagaaaaucuguaagauggaaaaaugcagcucuguguucaacguugugaacuccagcuccggaggccugucuaaggauaucauuaagcuccugaaugagcaggucaauaaagaaaugaacagcuccaaucuuuauaugagcaugucuuccugguguuacacccauagccuggacggggcgggacucuuucuguucgaucacgccgcugaggaguaugaacaugccaagaaacugaucauuuuucucaacgagaacaaugugcccgugcaacugacaucuaucagcgcuccggaacacaaguucgagggccuuacccagauuuuucagaaagccuacgaacacgagcagcauaucuccgagucuauuaacaauaucgucgaccacgccaucaagagcaaggaucaugcuacauucaacuuucugcaaugguauguugcggaacagcacgaggaagagguccucuucaaagacauucuggauaagaucgaacuuauugggaaugagaaccacggacuguaccucgccgaccaguaugugaaaggcaucgcuaagucccgcaaaagcugaggacuaguuauaagacugacuagcccgaugggccucccaacgggcccuccuccccuccuugcaccgagauuaaucaaaggcucuuuucagagccaccaaaaaaaaaaaaaaaaaaaaaaaaaaaaaaaaaaaaaaaaaaaaaaaaaaaaaaaaaaaaaaaaaaaaaaaaaaaaaaaaaaaaaaaaaaaaaaaaaaaaagaauu

SEQ ID NO: 9743 - RNA, 1841 nt, Artificial Sequence
  mRNA Design i-3 (hSL-A100-N5) comprising derived and/or modified sequence from Pf(3D7)__XP_001351122.1__HsALB_Pf-CSP(93-384)_L(PVTN)_HBsAg (opt5)
aggagaaagcuuaccaugaagugggugaccuucaucagccugcucuuucuguucuccucugccuacagcaaacuuaagcagcccgcugacggcaacccugauccgaaugccaaccccaaugucgacccuaacgcgaaucccaacguugauccuaaugcuaaccccaauguggacccuaacgccaauccgaacgccaaucccaacgcuaauccuaacgccaaccccaaugcuaacccuaaugccaaccccaaugcgaacccgaaugccaacccuaaugcuaaccccaaugccaacccuaaugcuaaccccaaugccaaccccaacgcgaauccuaacgccaauccgaacgcuaaucccaacgccaauccuaacgcuaaucccaacguggauccuaaugccaaccccaaugccaacccgaaugcuaacccuaacgcgaaucccaacgccaauccuaacgcuaaucccaacgccaauccuaacgccaaucccaacgcuaauccgaacgccaauccuaacgcgaaucccaacgcuaaccccaaugccaacccuaaugccaacccgaaugcuaaccccaaugccaacccuaaugcuaaccccaaugccaacccuaauaaaaacaaucaagggaacggacagggccacaauaugcccaacgacccuaacagaaaugucgaugagaacgcgaaugccaacuccgcugugaagaauaacaauaacgaggaacccucugacaaacauauuaaggaauaucugaauaagauccagaacagccucuccacagaguggucuccgugcagcguuacgugugggaaugggauucaggugcggaucaaaccuggcuccgccaacaagcccaaagaugaacuggacuacgcuaaugauauugagaagaaaaucugcaagauggagaaguguagcucugucuuuaacgugguuaauuccagcccugugaccaacauggaaaacaucacaucuggguuccuuggaccccugcucguccugcaagccggcuuuuuccugcucacccgcauucugacaaucccgcagucccuugacagcugguggaccucucugaauuuucucggcggguccccugugugccugggacagaacagccagucccccacaucuaaucacagcccuaccuccuguccucccauuugccccggcuauagauggaugugucuucggcgcuucaucauuuuucuguucauccuccugcugugccucauuuuucugcuugugcugcucgauuaccaagggaugcugccggucuguccccuuaucccuggaagcacgaccacaaacaccggccccugcaaaacauguaccacgccugcgcagggaaauucuauguuccccuccugcugcuguacaaagccuaccgacggaaacugcacauguaucccgauucccagcucuugggccuuugcuaaauaucugugggagugggccagcguuagauucuccuggcucucucugcuggugccuuucgugcagugguuugucggccucagccccaccguguggcuguccgcuaucuggaugaugugguacuggggcccuagccuuuauucuauuguuucccccuucaucccgcugcucccuaucuuuuucugccuguggguguacauuugaggacuaguuauaagacugacuagcccgaugggccucccaacgggcccuccuccccuccuugcaccgagauuaaucaaaggcucuuuucagagccaccaaaaaaaaaaaaaaaaaaaaaaaaaaaaaaaaaaaaaaaaaaaaaaaaaaaaaaaaaaaaaaaaaaaaaaaaaaaaaaaaaaaaaaaaaaaaaaaaaaaaagaauu

SEQ ID NO: 9744 - RNA, 1502 nt, Artificial Sequence; identical to SEQ ID NO: 7952
  mRNA Design i-3 (hSL-A100-N5) comprising derived and/or modified sequence from Pf(3D7)__XP_001351122.1__HsALB_Pf-CSP(199-377)_L(PVTN)_HBsAg (opt5)

SEQ ID NO: 9745 - RNA, 1199 nt, Artificial Sequence
  mRNA Design i-3 (hSL-A100-N5) comprising derived and/or modified sequence from Pf(3D7)__XP_001351122.1__HsALB_Pf-CSP(19-272)_L(AAY)_Pf-CSP(346-3 75)_L(AAY)_Pf-CSP(310-327) (opt5)
aggagaaagcuuaccaugaagugggugaccuucaucagccugcucuuucuguucuccucugccuacagccuuuuucaggaguaucaaugcuacggcuccucuagcaacacaagaguccugaaugaacucaacuaugacaaugcugggacgaaccuguacaaugagcuugaaaugaacuauuacggaaaacaggagaauugguauucccugaagaaaaacucucggagccucggcgaaaaugaugacgggaacaaugaggauaacgagaagcugcgcaaacccaagcacaagaaacugaagcagccugccgacggaaauccggaucccaacgcgaauccuaacguugaccccaacgcuaauccuaacguggaucccaaugccaacccuaauguggacccgaacgccaaucccaacgcuaauccuaacgccaaucccaacgcuaauccuaacgccaaucccaacgcgaacccgaaugccaacccuaaugcuaaccccaaugccaacccuaaugcuaaccccaaugccaaccccaaugcgaacccuaaugccaacccgaaugcuaaccccaacgccaauccuaacgcuaaucccaacgccaauccuaacgucgaucccaaugccaacccgaaugcuaacccuaaugcgaaccccaaugccaacccuaaugcuaaccccaacgccaauccuaacgccaaucccaacgcuaauccgaacgccaauccuaacgcgaaucccaacgcuaaucccaacgccaauccuaacgccaauccgaacgcuaaucccaacgccaacccuaaugcuaaccccaaugccaacccuaaugcgaaccccgccgcuuacauuaaaccuggcuccgccaauaagcccaaagacgaacucgauuacgcuaacgacaucgagaagaagauuuguaaaauggaaaagugcagcgccgcguaugagccgucugauaaacauaucaaggaguaccugaauaaaauucagaacucccuuugaggacuaguuauaagacugacuagcccgaugggccucccaacgggcccuccuccccuccuugcaccgagauuaaucaaaggcucuuuucagagccaccaaaaaaaaaaaaaaaaaaaaaaaaaaaaaaaaaaaaaaaaaaaaaaaaaaaaaaaaaaaaaaaaaaaaaaaaaaaaaaaaaaaaaaaaaaaaaaaaaaaaagaauu

SEQ ID NO: 9746 - RNA, 1247 nt, Artificial Sequence
  mRNA Design i-3 (hSL-A100-N5) comprising derived and/or modified sequence from Pf(3D7)__XP_001351122.1__HsALB_Pf-CSP(19-272)_L(AAY)_Pf-CSP(346-3 75)_L(AAY)_Pf-CSP(310-327)_L(AAY)_PADRE (opt5)
aggagaaagcuuaccaugaagugggugaccuucaucagccugcucuuucuguucuccucugccuacagccuuuuucaggaguaucaaugcuacggcuccucuagcaacacaagaguccugaaugaacucaacuaugacaaugcugggacgaaccuguacaaugagcuugaaaugaacuauuacggaaaacaggagaauugguauucccugaagaaaaacucucggagccucggcgaaaaugaugacgggaacaaugaggauaacgagaagcugcgcaaacccaagcacaagaaacugaagcagccugccgacggaaauccggaucccaacgcgaauccuaacguugaccccaacgcuaauccuaacguggaucccaaugccaacccuaauguggacccgaacgccaaucccaacgcuaauccuaacgccaaucccaacgcuaauccuaacgccaaucccaacgcgaacccgaaugccaacccuaaugcuaaccccaaugccaacccuaaugcuaaccccaaugccaaccccaaugcgaacccuaaugccaacccgaaugcuaaccccaacgccaauccuaacgcuaaucccaacgccaauccuaacgucgaucccaaugccaacccgaaugcuaacccuaaugcgaaccccaaugccaacccuaaugcuaaccccaacgccaauccuaacgccaaucccaacgcuaauccgaacgccaauccuaacgcgaaucccaacgcuaaucccaacgccaauccuaacgccaauccgaacgcuaaucccaacgccaacccuaaugcuaaccccaaugccaacccuaaugcgaaccccgccgcuuacauuaaaccuggcuccgccaauaagcccaaagacgaacucgauuacgcuaacgacaucgagaagaagauuuguaaaauggaaaagugcagcgccgcguaugagccgucugauaaacauaucaaggaguaccugaauaaaauucagaacucccuugccgcuuaugccaaguucguggcugccuggacccugaaagccgcugcgugaggacuaguuauaagacugacuagcccgaugggccucccaacgggcccuccuccccuccuugcaccgagauuaaucaaaggcucuuuucagagccaccaaaaaaaaaaaaaaaaaaaaaaaaaaaaaaaaaaaaaaaaaaaaaaaaaaaaaaaaaaaaaaaaaaaaaaaaaaaaaaaaaaaaaaaaaaaaaaaaaaaaagaauu

SEQ ID NO: 9747 - RNA, 1247 nt, Artificial Sequence
  mRNA Design i-3 (hSL-A100-N5) comprising derived and/or modified sequence from Pf(3D7)__XP_001351122.1__HsALB_Pf-CSP(19-272)_L(AAY)_Pf-CSP(310-3 27)_L(AAY)_Pf-CSP(346-375)_L(AAY)_PADRE (opt5)
aggagaaagcuuaccaugaagugggugaccuucaucagccugcucuuucuguucuccucugccuacagccuuuuucaggaguaucaaugcuacggcuccucuagcaacacaagaguccugaaugaacucaacuaugacaaugcugggacgaaccuguacaaugagcuugaaaugaacuauuacggaaaacaggagaauugguauucccugaagaaaaacucucggagccucggcgaaaaugaugacgggaacaaugaggauaacgagaagcugcgcaaacccaagcacaagaaacugaagcagccugccgacggaaauccggaucccaacgcgaauccuaacguugaccccaacgcuaauccuaacguggaucccaaugccaacccuaauguggacccgaacgccaaucccaacgcuaauccuaacgccaaucccaacgcuaauccuaacgccaaucccaacgcgaacccgaaugccaacccuaaugcuaaccccaaugccaacccuaaugcuaaccccaaugccaaccccaaugcgaacccuaaugccaacccgaaugcuaaccccaacgccaauccuaacgcuaaucccaacgccaauccuaacgucgaucccaaugccaacccgaaugcuaacccuaaugcgaaccccaaugccaacccuaaugcuaaccccaacgccaauccuaacgccaaucccaacgcuaauccgaacgccaauccuaacgcgaaucccaacgcuaaucccaacgccaauccuaacgccaauccgaacgcuaaucccaacgccaacccuaaugcuaaccccaaugccaacccuaaugcgaaccccgccgcuuacgaaccuuccgacaaacauauuaaggaguaccucaauaaaauccagaacagccuggccgcuuauauuaagcccggcucugccaauaagccgaaagaugaacuugacuacgcgaacgauaucgagaagaaaauuuguaagauggagaaaugcuccgccgcuuaugccaaguucguggcugccuggacccugaaagccgcugcgugaggacuaguuauaagacugacuagcccgaugggccucccaacgggcccuccuccccuccuugcaccgagauuaaucaaaggcucuuuucagagccaccaaaaaaaaaaaaaaaaaaaaaaaaaaaaaaaaaaaaaaaaaaaaaaaaaaaaaaaaaaaaaaaaaaaaaaaaaaaaaaaaaaaaaaaaaaaaaaaaaaaaagaauu

SEQ ID NO: 9748 - RNA, 1301 nt, Artificial Sequence
  mRNA Design i-3 (hSL-A100-N5) comprising derived and/or modified sequence from Pf(3D7)__XP_001351122.1__HsALB_Pf-CSP(19-272)_L(AAY)_Pf-CSP(310-3 27)_L(AAY)_Pf-CSP(346-375)_L(AAY)_PADRE_L(AAY)_P2 (opt5)
aggagaaagcuuaccaugaagugggugaccuucaucagccugcucuuucuguucuccucugccuacagccuuuuucaggaguaucaaugcuacggcuccucuagcaacacaagaguccugaaugaacucaacuaugacaaugcugggacgaaccuguacaaugagcuugaaaugaacuauuacggaaaacaggagaauugguauucccugaagaaaaacucucggagccucggcgaaaaugaugacgggaacaaugaggauaacgagaagcugcgcaaacccaagcacaagaaacugaagcagccugccgacggaaauccggaucccaacgcgaauccuaacguugaccccaacgcuaauccuaacguggaucccaaugccaacccuaauguggacccgaacgccaaucccaacgcuaauccuaacgccaaucccaacgcuaauccuaacgccaaucccaacgcgaacccgaaugccaacccuaaugcuaaccccaaugccaacccuaaugcuaaccccaaugccaaccccaaugcgaacccuaaugccaacccgaaugcuaaccccaacgccaauccuaacgcuaaucccaacgccaauccuaacgucgaucccaaugccaacccgaaugcuaacccuaaugcgaaccccaaugccaacccuaaugcuaaccccaacgccaauccuaacgccaaucccaacgcuaauccgaacgccaauccuaacgcgaaucccaacgcuaaucccaacgccaauccuaacgccaauccgaacgcuaaucccaacgccaacccuaaugcuaaccccaaugccaacccuaaugcgaaccccgccgcuuacgaaccuuccgacaaacauauuaaggaguaccucaauaaaauccagaacagccuggccgcuuauauuaagcccggcucugccaauaagccgaaagaugaacuugacuacgcgaacgauaucgagaagaaaauuuguaagauggagaaaugcuccgccgcuuaugccaaguucguggcugccuggacccugaaagccgcugcggccgcuuaccaauauaucaaggccaauagcaaguuuaucgggauuacagaacucugaggacuaguuauaagacugacuagcccgaugggccucccaacgggcccuccuccccuccuugcaccgagauuaaucaaaggcucuuuucagagccaccaaaaaaaaaaaaaaaaaaaaaaaaaaaaaaaaaaaaaaaaaaaaaaaaaaaaaaaaaaaaaaaaaaaaaaaaaaaaaaaaaaaaaaaaaaaaaaaaaaaaagaauu

SEQ ID NO: 9749 - RNA, 1265 nt, Artificial Sequence
  mRNA Design i-3 (hSL-A100-N5) comprising derived and/or modified sequence from Pf(3D7)__XP_001351122.1__HsALB_Pf-CSP(19-272)_L(AAY)_Pf-CSP(310-3 27)_Linker (AAY)_Pf-CSP(346-397) (opt5)
aggagaaagcuuaccaugaagugggugaccuucaucagccugcucuuucuguucuccucugccuacagccuuuuucaggaguaucaaugcuacggcuccucuagcaacacaagaguccugaaugaacucaacuaugacaaugcugggacgaaccuguacaaugagcuugaaaugaacuauuacggaaaacaggagaauugguauucccugaagaaaaacucucggagccucggcgaaaaugaugacgggaacaaugaggauaacgagaagcugcgcaaacccaagcacaagaaacugaagcagccugccgacggaaauccggaucccaacgcgaauccuaacguugaccccaacgcuaauccuaacguggaucccaaugccaacccuaauguggacccgaacgccaaucccaacgcuaauccuaacgccaaucccaacgcuaauccuaacgccaaucccaacgcgaacccgaaugccaacccuaaugcuaaccccaaugccaacccuaaugcuaaccccaaugccaaccccaaugcgaacccuaaugccaacccgaaugcuaaccccaacgccaauccuaacgcuaaucccaacgccaauccuaacgucgaucccaaugccaacccgaaugcuaacccuaaugcgaaccccaaugccaacccuaaugcuaaccccaacgccaauccuaacgccaaucccaacgcuaauccgaacgccaauccuaacgcgaaucccaacgcuaaucccaacgccaauccuaacgccaauccgaacgcuaaucccaacgccaacccuaaugcuaaccccaaugccaacccuaaugcgaaccccgccgcuuacgaaccuuccgacaaacauauuaaggaguaccucaauaaaauccagaacagccuggccgcuuauauuaagcccggcucugccaauaagccgaaagaugaacuugacuacgcgaacgauaucgagaagaaaauuuguaagauggagaaaugcuccagcguguucaauguugugaacucuuccaucgggcugaucaugguccucagcuuucuguuccuuaauugaggacuaguuauaagacugacuagcccgaugggccucccaacgggcccuccuccccuccuugcaccgagauuaaucaaaggcucuuuucagagccaccaaaaaaaaaaaaaaaaaaaaaaaaaaaaaaaaaaaaaaaaaaaaaaaaaaaaaaaaaaaaaaaaaaaaaaaaaaaaaaaaaaaaaaaaaaaaaaaaaaaaagaauu

SEQ ID NO: 9750 - RNA, 1865 nt, Artificial Sequence
  mRNA Design i-3 (hSL-A100-N5) comprising derived and/or modified sequence from Pf(3D7)__XP_001351122.1__LumSynt_L(GGS4-GGG)_Pf-CSP(19-397) (opt6)
aggagaaagcuuaccaugcaaauauacgaaggaaaacuaacagcagaaggauuacgauucggcauaguagcaucaagguucaaccacgcauuaguagauagacuaguagaaggagcaauagacgcaauaguccgacauggaggacgagaagaagauauaacacuagucagaguaccagggagcugggaaaucccaguagcagcaggagaacucgcaagaaaagaagauaucgacgccguaaucgcaaucgggguacuaauaagaggcgcaacaccccauuucgacuacauagcaagcgaaguaucaaaaggauuagcagaccuaaguuuagaacuaagaaaaccuauuacauucggcgucauaacggcagacacauuagaacaagccaucgaaagagcaggaacaaaacacggaaacaaaggcugggaagcagcacuaagcgcaauugaaauggcaaauuuauucaaaucccuaagaggcggcucagguggcaguggaggaucaggaggaucaggaggaggccuauuccaagaauaucaaugcuacggaucgagcucgaauacacgcguauuaaacgaauuaaacuacgacaacgcaggaacaaaccuauacaacgaacuagaaaugaacuauuauggaaaacaagagaacugguacucccuaaaaaaaaacagucgaagcuuaggagaaaaugacgacggaaauaacgaagacaacgaaaaacuaagaaaacccaaacauaaaaaauuaaaacaacccgcugacggaaacccagacccaaacgcuaacccgaacguugauccaaaugcaaacccaaauguggauccaaaugcaaaccccaacguagauccaaaugcaaacccaaacgcaaaccccaaugccaacccaaacgccaacccuaaugcuaauccaaacgcaaacccaaacgcaaacccgaacgcaaauccaaacgcaaacccuaaugcuaacccaaaugcaaauccaaacgcaaacccaaacgcuaacccaaacgcaaacccaaaugcaaacccaaaugcaaacccaaacgcaaauccaaacguagacccaaacgcaaauccaaacgcaaauccaaacgcaaacccaaacgccaaccccaaugcaaauccgaacgcaaacccaaacgcaaacccaaacgcaaacccaaacgcaaacccaaaugccaacccaaacgcaaacccgaacgcaaacccaaacgcaaacccaaacgcaaacccuaaugcgaacccaaaugccaacccaaacgcaaaccccaacgcuaacccaaacaaaaacaaucaaggaaacggacaagggcacaacaugccaaacgauccaaacagaaaugucgacgaaaacgccaaugcaaacagugccguaaaaaauaauaacaacgaagaaccuucagacaaacacauaaaagaauacuuaaacaaaauacaaaacucauuaucaaccgaauggagcccauguucuguuacaugcggaaauggaauacaaguaagaauaaaaccaggaucagcaaacaaaccaaaagacgaauuagacuacgcaaaugauauagaaaaaaaaauaugcaagauggaaaaaugcaguucuguauuuaacguaguaaacagcucaauaggucuaauaaugguacuauccuuucuuuuccugaacuaaggacuaguuauaagacugacuagcccgaugggccucccaacgggcccuccuccccuccuugcaccgagauuaaucaaaggcucuuuucagagccaccaaaaaaaaaaaaaaaaaaaaaaaaaaaaaaaaaaaaaaaaaaaaaaaaaaaaaaaaaaaaaaaaaaaaaaaaaaaaaaaaaaaaaaaaaaaaaaaaaaaaagaauu

SEQ ID NO: 9751 - RNA, 1727 nt, Artificial Sequence
  mRNA Design i-3 (hSL-A100-N5) comprising derived and/or modified sequence from Pf(3D7)__XP_001351122.1__HsALB_Pf-CSP(19-272)_L(PVTN)_HBsAg (opt6)
aggagaaagcuuaccaugaaauggguaaccuucaucucacuauuauucuuauuuucaucugcauacucacucuuccaagaauaccaaugcuacgguucaucuucuaacacaagaguacuaaacgaacuaaacuacgacaacgcaggaacaaaccucuauaacgaacuugaaaugaacuacuauggaaaacaagaaaacugguauucccuaaaaaaaaacucaagauccuuaggagaaaacgacgacggaaauaacgaagacaacgaaaaacuaagaaaaccaaaacacaaaaaacuaaaacaacccgcagacggaaacccagacccaaacgcaaacccaaacguagacccaaacgcaaacccaaacgucgacccaaacgccaauccaaacguagacccaaacgcuaacccaaacgccaauccaaacgcaaauccaaaugccaacccaaacgcaaacccaaaugcgaauccaaaugcaaaccccaaugcaaacccaaacgcaaauccaaacgcaaacccaaacgcaaacccuaacgcaaauccaaaugcaaacccuaacgcaaacccaaacgcaaauccaaacgcaaacccaaaugcaaauccaaacgucgacccaaacgcaaacccgaacgcaaacccaaacgcaaacccaaaugcaaauccaaaugcaaaccccaaugcaaacccaaacgcaaacccaaacgcuaacccaaaugcaaacccaaacgcaaacccaaacgcaaauccaaacgcaaacccaaacgcaaacccaaaugcaaacccaaacgcaaaccccaaugcaaauccaaacgcaaacccaaacgcaaacccacccguaaccaacauggaaaacaucacaucaggauuccuuggaccccucuuaguacuucaagcaggauucuuccuauuaacaagaauacuaacaauaccucaaucuuuagauucaugguggacuucauuaaauuuccuaggaggaagcccaguaugcuuaggacaaaacagccaaucaccaaccucaaaccacucaccaaccucaugcccaccaauaugcccaggauaccgauggaugugccuaagaagauucauaauauucuuauucauacuacuacuaugccucauauucuuacuaguacuauuagacuaccaaggaaugcugccagucugcccacuuauaccagguagcaccaccacuaacacaggaccuugcaaaacaugcacaacacccgcucaaggaaauucuauguuuccaucaugcugcugcacuaaacccacagauggcaauuguacaugcauaccaauccccucaucaugggcauuugccaaauacuuaugggaaugggcaucuguaagauucucuuggcuaucacucuuaguaccauucguacaaugguucguaggccuauccccuacaguauggcuauccgcaauauggaugaugugguacuggggaccaucacuauacucaauagucucacccuucauaccacuauuaccaauauucuucugccuauggguauauauauaaggacuaguuauaagacugacuagcccgaugggccucccaacgggcccuccuccccuccuugcaccgagauuaaucaaaggcucuuuucagagccaccaaaaaaaaaaaaaaaaaaaaaaaaaaaaaaaaaaaaaaaaaaaaaaaaaaaaaaaaaaaaaaaaaaaaaaaaaaaaaaaaaaaaaaaaaaaaaaaaaaaaagaauu

SEQ ID NO: 9752 - RNA, 1844 nt, Artificial Sequence
  mRNA Design i-3 (hSL-A100-N5) comprising derived and/or modified sequence from Pf(3D7)__XP_001351122.1__HsALB_Pf-CSP(19-272)_L(AAY)_Pf-CSP(346-3 65)_L(AAY)_PADRE_L(PVTN)_HBsAg (opt6)
aggagaaagcuuaccaugaaaugggucaccuucauuuccuuauuauucuuauuuucguccgcauacucacuauuucaagaauaucaauguuacggaucaagcucaaacacccgcguacucaacgaacuaaacuacgacaacgcaggaacaaaccuauauaacgaacuagaaaugaauuauuacggaaaacaagaaaacugguauucacuuaaaaaaaacuccagaucccuuggcgaaaacgacgacggaaauaaugaagacaacgaaaaacuuagaaaaccaaaacauaaaaaacuaaaacaaccugcagacgguaacccagauccaaaugcuaacccaaauguagacccuaacgcuaacccaaacguagauccaaacgccaacccaaacguagauccaaacgcaaacccaaacgcaaauccaaaugcaaacccaaacgccaaccccaacgcaaacccaaaugcaaauccuaaugcaaaucccaacgcaaauccaaacgcaaauccaaaugcaaaccccaacgcaaacccaaaugcaaauccaaaugcaaauccaaaugcaaacccaaacgcaaacccaaaugcaaauccuaacgcaaacccaaacgucgaccccaacgcaaauccaaacgcaaacccaaacgcaaaccccaaugcaaacccaaaugcaaacccaaacgcaaacccaaacgcaaaccccaacgcaaauccaaacgcaaauccaaaugcaaauccaaacgcaaaccccaaugcaaaccccaaugcuaacccaaacgccaaucccaacgcaaacccaaacgcaaaucccaacgcaaauccaaacgcaaacccugcagcauacauaaaacccggcucugcuaauaaacccaaagaugaacucgacuaugccaacgacauagaagcagccuacgcaaaauucguagcugcauggacauuaaaagcagcagcaccagugacaaacauggaaaacauuacaucaggauucuuagguccauuauuaguccuccaagcaggauucuucuuacuaacuagaauauuaacaauaccacaaucccuagacucuugguggacuucacuaaauuuccuaggaggauccccaguaugucucggucaaaauucucaaucaccuacaucaaaccauucaccaacaagcugccccccaaucugucccggauacagauggaugugccuacgcagauucauuauauuucuauucauacuacuucuaugccuaauauuccuacuaguccuucuagacuaccaaggaaugcuacccguaugcccacuuauaccaggauccacaacaacaaacacagguccaugcaaaacaugcacaacaccagcccaagguaauucuauguucccaucaugcuguugcacaaaaccaacagacgguaacugcacaugcaucccaauacccucaucaugggcauucgcaaaauaccuaugggaaugggcuucaguaagauucuccugguuaucccuuuuagucccauucguacaaugguucguaggauuaucacccacuguauggcuaucagcaauauggaugaugugguauuggggcccaucucuuuacucaaucgucuccccuuuuauuccacuacuacccauauuuuucugccuauggguauacauuuaaggacuaguuauaagacugacuagcccgaugggccucccaacgggcccuccuccccuccuugcaccgagauuaaucaaaggcucuuuucagagccaccaaaaaaaaaaaaaaaaaaaaaaaaaaaaaaaaaaaaaaaaaaaaaaaaaaaaaaaaaaaaaaaaaaaaaaaaaaaaaaaaaaaaaaaaaaaaaaaaaaaaagaauu

SEQ ID NO: 9753 - RNA, 2063 nt, Artificial Sequence
  mRNA Design i-3 (hSL-A100-N5) comprising derived and/or modified sequence from Pf(3D7)__XP_001351122.1__HsALB_Pf-CSP(19-384)_L(PVTN)_HBsAg (opt6)
aggagaaagcuuaccaugaaauggguaaccuucauaucucucuuauuccuuuuuucaucugcauauucacuauuucaagaauaucaauguuauggaucaucaucaaacacccgaguacucaacgaauuaaauuacgacaacgcagguacuaacuuauacaacgaauuagaaaugaauuacuauggaaaacaagaaaacugguauucccucaaaaaaaacucucgaucucuaggcgaaaacgacgacggcaacaacgaagacaacgaaaaacuacguaaacccaaacacaaaaaacuaaaacaaccagcagauggaaacccagacccaaacgcaaacccaaacguagacccaaacgcaaauccaaacguagacccgaacgcaaauccaaauguagaucccaaugcuaauccaaaugccaacccaaacgcaaacccuaacgcuaaucccaacgcaaacccaaacgcaaacccaaaugcaaacccaaacgcaaaccccaacgcaaacccaaaugcaaauccaaaugcaaauccaaacgccaacccaaaugccaacccaaacgcaaauccaaacgcuaaccccaacgcaaaccccaacgccaaucccaacguagaccccaacgcaaacccaaaugcaaauccaaacgcaaaccccaaugcaaacccaaacgcuaacccuaaugcaaacccaaacgccaacccaaaugcaaaccccaacgccaacccaaacgcaaauccaaacgcaaacccaaacgcuaacccaaacgccaacccaaacgcaaacccaaacgcuaacccaaacgcaaacccaaaugcaaacccaaaugcuaauccaaauaaaaacaaccaaggaaacggccaaggacauaauaugccuaacgacccaaacagaaacguagacgaaaaugcaaacgcaaacuccgcaguaaaaaauaacaauaacgaagaacccuccgacaaacauauaaaagaauaucuaaacaaaauacaaaauucacucucuacugaaugguccccaugcucaguaacauguggaaacggaauccaaguacgcauaaaaccaggaucagcaaacaaaccaaaagacgaacuagacuacgcaaacgauauagaaaaaaaaauaugcaaaauggaaaaaugcuccuccguauucaacguagucaauucaucuccaguaaccaauauggaaaauauaaccuccggauuccuaggaccacuacucguuuuacaagcaggauucuucuuacuaacaagaauacucacuauaccacaaucccuggauucuugguggacaucccuaaauuucuuaggcggaucacccguaugccuaggccaaaauagccaaaguccaacuucaaaccacuccccaacuucuugcccaccaauaugccccggcuacagauggaugugccuucgacgauucauaauauuucuauucauacuauuacuaugucuaauauuccuacucguucuauuagacuaccaaggaauguuaccaguuugcccacuaauaccugguucaacaaccacuaacacuggucccugcaaaacauguaccaccccagcccaaggaaacucaauguuccccucaugcuguugcacaaaaccaaccgacggaaauugcacaugcauacccauaccaucuucuugggcauuugcuaaauaucuaugggaaugggcaucaguacgcuucucauggcuaucucuacuaguaccauucguccaaugguucguaggccuaucaccaacaguauggcuaucugcaauauggaugaugugguacuggggucccuccuuauauucaauuguaucaccuuuuaucccacuccuacccauauucuucuguuuauggguauacauauaaggacuaguuauaagacugacuagcccgaugggccucccaacgggcccuccuccccuccuugcaccgagauuaaucaaaggcucuuuucagagccaccaaaaaaaaaaaaaaaaaaaaaaaaaaaaaaaaaaaaaaaaaaaaaaaaaaaaaaaaaaaaaaaaaaaaaaaaaaaaaaaaaaaaaaaaaaaaaaaaaaaaagaauu

SEQ ID NO: 9754 - RNA, 1880 nt, Artificial Sequence
  mRNA Design i-3 (hSL-A100-N5) comprising derived and/or modified sequence from Pf(3D7)__XP_001351122.1__HsALB_Pf-CSP(19-384)_L(SGG)_Ferritin (opt6)
aggagaaagcuuaccaugaaauggguaacauuuauaucucuauuauucuuauucuccucagcauacucacucuuucaagaauaccaaugcuacgguucuucauccaacacacgaguccuaaacgaauuaaacuacgacaaugcaggaaccaaucuauacaaugaacuugaaaugaacuacuacggaaaacaagaaaacugguacucccuaaaaaaaaacucacgaagccuaggagaaaaugacgacggaaacaacgaagacaacgaaaaacuacgaaaacccaaacacaaaaaacuaaaacaacccgccgacggcaauccagauccaaacgcaaacccaaacguagaccccaacgccaacccaaacguagauccaaacgcaaauccaaauguugauccaaaugcaaaccccaacgcaaacccaaacgcaaacccaaacgcaaacccaaacgcaaacccaaacgcaaauccaaaugcaaaucccaacgcaaauccaaacgcaaauccaaaugcaaacccaaacgcuaaucccaacgcuaacccaaacgcaaacccaaacgcaaacccgaacgcuaacccaaacgcaaacccaaacgcaaaccccaacguagacccaaacgcaaacccaaacgcaaaccccaacgcaaacccaaacgcaaacccaaacgcaaaccccaacgcaaaccccaacgcaaacccaaacgccaaccccaaugcaaacccaaacgccaacccaaacgcaaacccaaacgcaaacccaaacgcaaacccaaacgcaaauccaaacgcaaacccaaacgcaaacccaaacgcaaacccaaaugcaaacccaaacaaaaacaaccaaggaaauggacaaggacacaacaugccaaacgacccaaaccguaacguagaugaaaaugccaacgcaaacucagccguaaaaaacaacaacaacgaagaaccuucagacaaacacauaaaagaauacuuaaacaaaauacaaaacucauuaucaacugaauggucccccuguucagucacaugcggaaauggaauacaaguaagaauuaaaccagguucagccaacaaaccaaaagacgaacuagacuacgcaaacgacauugaaaaaaaaauauguaaaauggaaaaauguaguucagucuucaacguaguaaacucaucauccggaggauuauccaaagacauaauaaaacucuuaaaugaacaaguaaacaaagaaaugaacucgagcaaccucuauaugucaaugucauccuggugcuacacccauucccuagacggcgccggacuauuccuguucgaccaugcagcagaagaauaugaacacgcaaaaaagcuaaucaucuucuuaaacgaaaacaaugucccaguacaacuaaccuccauaucagcaccugaacauaaauucgaaggacuaacacaaauauuucaaaaagcauacgaacacgaacaacacauaucagaaucaauuaauaacauaguagaccacgcaaucaaaagcaaggaccacgcaacauucaacuuucuacaaugguacguagcagaacaacaugaagaagaaguacucuucaaagacaucuuagacaaaauugaacucauaggaaacgaaaaucacggacucuaccucgcagaccaguacguaaaaggaaucgcaaaaucacguaaaagcuaaggacuaguuauaagacugacuagcccgaugggccucccaacgggcccuccuccccuccuugcaccgagauuaaucaaaggcucuuuucagagccaccaaaaaaaaaaaaaaaaaaaaaaaaaaaaaaaaaaaaaaaaaaaaaaaaaaaaaaaaaaaaaaaaaaaaaaaaaaaaaaaaaaaaaaaaaaaaaaaaaaaaagaauu

SEQ ID NO: 9755 - RNA, 1841 nt, Artificial Sequence
  mRNA Design i-3 (hSL-A100-N5) comprising derived and/or modified sequence from Pf(3D7)__XP_001351122.1__HsALB_Pf-CSP(93-384)_L(PVTN)_HBsAg (opt6)
aggagaaagcuuaccaugaaauggguaacuuuuauaucccuccuauuucuauuuucaucagccuauucaaaacuaaaacaacccgcagauggaaaucccgacccaaaugcaaauccaaauguagauccaaacgccaacccaaaugucgacccaaaugcaaacccaaacguagauccuaacgcaaacccaaaugcuaauccaaacgcuaacccaaacgcaaauccaaaugcuaacccaaacgcaaacccuaacgcaaacccaaacgcuaacccaaacgcaaacccaaacgccaacccaaacgcaaaccccaacgcaaacccuaacgcaaacccaaacgcaaacccaaaugccaacccaaacgcaaacccaaacgcaaacccaaacguagaccccaacgcuaauccaaaugcaaauccaaacgcaaacccaaaugccaacccaaacgccaacccuaaugcaaacccaaacgcaaacccaaaugcaaaccccaacgcaaauccaaacgcaaauccaaaugcaaacccaaacgcuaacccaaacgcaaaccccaaugcaaacccaaacgcaaauccaaaugcaaacccaaaugcaaauccaaaugcaaacccaaauaaaaacaaccaaggaaacggacaaggccauaacaugccaaacgacccaaaccgcaacgucgaugaaaacgccaacgcaaauucagcgguuaaaaacaacaacaaugaagaacccucagacaaacacauaaaagaauacuuaaacaaaauacaaaacucacuaucgacagaaugguccccaugcuccguaaccugcgguaauggaauacaagucagaauaaaaccaggaucagcuaauaaaccaaaagacgaauuagacuacgcaaacgacauagaaaagaaaauaugcaaaauggaaaaauguucuucaguauuuaacguagucaacucaucacccguaacuaacauggaaaacauaaccucaggauuucuagguccuuuacucguacuacaagcaggauuuuuccuacuuacccgaauccuaacaauaccucaaucucuagacucaugguggacaucccuaaauuucuuaggcggaucaccaguuugccucggacaaaacucucaaucaccaacuucaaaucacuccccaacaucuugcccaccaauaugcccaggauaucgauggaugugucuacgacguuuuauaauauuucuauuuauacuacuacucugucuaauauuccuauuaguacuacucgacuaucaaggaaugcuccccgucuguccccucauacccggaucaacaacuacaaacaccggaccgugcaaaaccugcacaaccccagcucaaggaaauucaauguucccaucaugcugcuguacaaaaccaacagauggaaacugcacaugcauaccaaucccaucaagcugggccuuugccaaauauuuaugggaaugggccuccgucagauucucauggcucucccuucuaguuccauucguacaaugguuuguaggccuauccccaaccguauggcuauccgccauauggaugaugugguauuggggaccaucacuauacucaauaguauccccauucauaccacuccuacccauauucuuuugccuauggguauacauuuaaggacuaguuauaagacugacuagcccgaugggccucccaacgggcccuccuccccuccuugcaccgagauuaaucaaaggcucuuuucagagccaccaaaaaaaaaaaaaaaaaaaaaaaaaaaaaaaaaaaaaaaaaaaaaaaaaaaaaaaaaaaaaaaaaaaaaaaaaaaaaaaaaaaaaaaaaaaaaaaaaaaaagaauu

SEQ ID NO: 9756 - RNA, 1502 nt, Artificial Sequence
  mRNA Design i-3 (hSL-A100-N5) comprising derived and/or modified sequence from Pf(3D7)__XP_001351122.1__HsALB_Pf-CSP(199-377)_L(PVTN)_HBsAg (opt6)
aggagaaagcuuaccaugaaauggguaacauucauaucauuacucuucuuauuuuccucugcauacucagauccaaaugcaaacccaaaugcaaacccaaacgcaaacccaaaugccaauccaaaugcaaacccaaaugcaaacccaaacgcaaacccaaacgcaaacccaaacgcaaacccuaaugcaaacccaaaugcaaauccaaacgcuaacccaaacgcaaacccaaaugccaacccaaacgccaauccaaacgcaaacccaaacgcaaaucccaaugcaaacccuaacaaaaacaaucaaggaaacggacaaggccacaacaugccaaaugacccaaaccgcaauguagacgaaaaugccaacgcaaacuccgcuguaaaaaacaauaacaacgaagaaccuuccgauaaacauauaaaagaauacuuaaauaaaauacaaaauucauuaucaacagaauggucaccaugcucagucacaugcggaaauggaauacaaguaagaauaaaacccgguuccgcaaacaaaccaaaagacgaacuagacuacgcaaaugacaucgaaaaaaaaauaugcaaaauggaaaaauguucuucaguaccaguaacaaacauggaaaacaucaccucuggauuccuaggaccacuauuaguacuacaagcaggauucuuccuccuaacaagaauauuaacaauaccacaaucacuugacucaugguggacaucccucaauuuccuaggaggauccccaguaugucuaggucaaaacucucaaucuccaacauccaaccauucacccacaucaugcccucccauaugcccaggauaccgauggaugugccucagaagauucauaauauuccuauucauauuacuccuauguuuaaucuuucuacuagucuuauuagacuaccaaggaaugcuaccaguaugcccacuaaucccaggauccacaacaacaaacacaggccccugcaaaacauguacaacaccagcacaaggaaacucaauguucccaucaugcuguugcacaaaaccaacagacggaaacugcacaugcaucccaauaccaucaucuugggcauuugcaaaauacuuaugggaaugggcaucaguacgcuuuucauggcucucccuccucguaccauucguccaaugguucguaggucuaucaccaacaguuuggcuauccgcuauauggaugaugugguauuggggcccuucccuauacucaauaguuucaccauuuauaccacuccuaccaauauuuuucugccuuuggguauacauauaaggacuaguuauaagacugacuagcccgaugggccucccaacgggcccuccuccccuccuugcaccgagauuaaucaaaggcucuuuucagagccaccaaaaaaaaaaaaaaaaaaaaaaaaaaaaaaaaaaaaaaaaaaaaaaaaaaaaaaaaaaaaaaaaaaaaaaaaaaaaaaaaaaaaaaaaaaaaaaaaaaaaagaauu

SEQ ID NO: 9757 - RNA, 1199 nt, Artificial Sequence
  mRNA Design i-3 (hSL-A100-N5) comprising derived and/or modified sequence from Pf(3D7)__XP_001351122.1__HsALB_Pf-CSP(19-272)_L(AAY)_Pf-CSP(346-3 75)_L(AAY)_Pf-CSP(310-327) (opt6)
aggagaaagcuuaccaugaaauggguaaccuucauuucacuucucuuccuauucuccagcgcauacucacucuuccaagaauaccaaugcuacggcucaaguuccaacacacgaguacuaaacgaauuaaacuacgacaaugcuggaaccaaccuauacaacgaacucgaaaugaacuacuacgguaaacaagaaaacugguauucacuaaaaaaaaacucaaggucccuaggagaaaacgacgacggaaacaacgaagacaacgaaaaauuaagaaaaccaaaacacaaaaaacuaaaacaacccgcagacggaaaccccgacccaaacgcaaacccaaacguagauccaaacgcaaacccaaacguagacccaaacgcaaacccaaacguagacccaaacgcaaacccuaaugcaaacccaaacgcaaacccaaacgcaaacccaaacgcaaacccaaacgcaaacccaaacgcaaaccccaacgccaacccaaacgcaaacccaaacgcaaacccaaacgcaaacccaaacgcaaacccaaacgcaaacccaaacgcaaacccaaacgcaaacccaaaugcaaacccaaacgcaaacccaaacguagacccaaacgcaaacccaaacgcaaacccaaaugcaaacccaaacgcaaacccaaacgcaaacccaaacgcuaacccaaacgcaaacccaaacgcuaauccaaaugcuaaccccaacgcaaacccaaaugcaaacccaaacgcuaauccaaaugcaaauccaaacgcaaacccaaacgcaaacccaaacgcaaacccaaacgcaaacccaaacgcaaauccagccgcauacauaaaacccggcucagcaaacaaaccaaaagacgaacuagacuacgccaacgacauagaaaaaaaaauaugcaaaauggaaaaaugcucagccgcauacgaaccaucagacaaacacaucaaagaauacuuaaacaaaauacaaaacagcuuauaaggacuaguuauaagacugacuagcccgaugggccucccaacgggcccuccuccccuccuugcaccgagauuaaucaaaggcucuuuucagagccaccaaaaaaaaaaaaaaaaaaaaaaaaaaaaaaaaaaaaaaaaaaaaaaaaaaaaaaaaaaaaaaaaaaaaaaaaaaaaaaaaaaaaaaaaaaaaaaaaaaaaagaauu

SEQ ID NO: 9758 - RNA, 1247 nt, Artificial Sequence
  mRNA Design i-3 (hSL-A100-N5) comprising derived and/or modified sequence from Pf(3D7)__XP_001351122.1__HsALB_Pf-CSP(19-272)_L(AAY)_Pf-CSP(346-3 75)_L(AAY)_Pf-CSP(310-327)_L(AAY)_PADRE (opt6)
aggagaaagcuuaccaugaaauggguaacauucauaucacuacuauuccuauucucauccgccuacucacucuuucaagaauaucaaugcuacggaucaagcucaaauacaagaguacuaaacgaacuaaacuacgacaacgcaggaaccaaccuauacaacgaacuagaaaugaacuacuacggaaaacaagaaaacugguacucacuuaaaaaaaacucaagaucacuaggagaaaacgacgacggaaacaacgaagacaacgaaaaacuacgaaaaccaaaacauaaaaaacuaaaacaaccagcagacggaaacccagacccaaacgcaaauccaaacguagacccaaaugcaaacccaaacguagacccaaacgcaaacccaaacguagacccaaaugcaaacccaaacgcaaauccaaacgcaaacccaaacgcaaacccaaacgcaaacccaaacgcaaacccaaacgcaaacccaaaugcaaauccaaacgcaaacccaaaugcaaacccaaacgcaaacccaaacgcgaacccaaacgccaaccccaacgcaaacccaaacgcaaauccaaaugcaaacccaaacgccaauccaaacguagacccaaacgcaaauccaaacgcaaacccaaacgcaaacccaaacgcaaacccuaacgcaaacccaaacgcaaacccaaacgcaaacccaaacgccaacccaaacgcaaaccccaacgcaaacccaaacgcaaacccaaacgcaaaccccaacgcaaauccaaacgcuaacccaaacgcuaaccccaacgcaaacccaaaugcaaacccaaacgccaacccagccgcauacauaaaaccaggaucagcaaauaaaccaaaagacgaacuagacuacgcaaacgacauagaaaaaaaaauaugcaaaauggaaaaaugcuccgcagcauacgaaccaucagacaaacacaucaaagaauaccuaaacaaaauccaaaacucacuagccgccuacgcaaaauuugucgcagcauggacacucaaagcagcagcauaaggacuaguuauaagacugacuagcccgaugggccucccaacgggcccuccuccccuccuugcaccgagauuaaucaaaggcucuuuucagagccaccaaaaaaaaaaaaaaaaaaaaaaaaaaaaaaaaaaaaaaaaaaaaaaaaaaaaaaaaaaaaaaaaaaaaaaaaaaaaaaaaaaaaaaaaaaaaaaaaaaaaagaauu

SEQ ID NO: 9759 - RNA, 1247 nt, Artificial Sequence
  mRNA Design i-3 (hSL-A100-N5) comprising derived and/or modified sequence from Pf(3D7)__XP_001351122.1__HsALB_Pf-CSP(19-272)_L(AAY)_Pf-CSP(310-3 27)_L(AAY)_Pf-CSP(346-375)_L(AAY)_PADRE (opt6)
aggagaaagcuuaccaugaaauggguaaccuucauaucccuacuauuucuauucuccucagcauacucacuauuccaagaauaccaaugcuacggcucaucaucaaacacaagaguacuaaaugaacuaaacuacgacaacgccggaaccaaccuauacaaugaacucgaaaugaauuacuacggaaaacaagaaaacugguacucacuaaaaaaaaacucaagaagccuaggagaaaacgacgacggaaacaacgaagacaacgaaaaauuacgaaaaccaaaacauaaaaaacuaaaacaacccgccgacggaaacccagacccaaacgcaaacccaaacguagacccaaacgcaaauccaaacguagacccaaacgcaaauccaaauguagacccaaacgcaaacccaaacgcaaacccaaacgcaaacccaaacgcaaacccgaacgcaaauccaaacgcaaacccaaacgcaaacccaaacgcaaacccaaacgcaaacccaaacgcaaaccccaacgcaaacccaaaugcaaacccaaacgcaaacccaaaugcaaauccaaacgcaaacccaaacgcaaacccaaacgcaaacccaaacguagacccaaaugcaaaccccaacgcaaacccaaacgcaaacccaaacgcaaacccaaacgcaaacccaaacgcaaacccaaacgcaaacccaaacgcaaacccaaacgccaauccaaacgcaaauccaaacgcaaacccaaacgcaaacccaaacgcaaacccaaacgcaaacccaaacgcaaacccaaacgcaaacccaaaugcaaacccaaacgcaaacccagcagcauacgaaccuucagacaaacacauaaaagaauacuuaaacaaaauacaaaacucacuagcagccuacaucaaaccaggauccgcaaacaaaccaaaagacgaacuagacuacgcaaacgacauagaaaaaaaaauauguaaaauggaaaaaugcucagccgcauaugcuaaauucgucgcagcauggaccuuaaaagcagcagcauaaggacuaguuauaagacugacuagcccgaugggccucccaacgggcccuccuccccuccuugcaccgagauuaaucaaaggcucuuuucagagccaccaaaaaaaaaaaaaaaaaaaaaaaaaaaaaaaaaaaaaaaaaaaaaaaaaaaaaaaaaaaaaaaaaaaaaaaaaaaaaaaaaaaaaaaaaaaaaaaaaaaaagaauu

SEQ ID NO: 9760 - RNA, 1301 nt, Artificial Sequence
  mRNA Design i-3 (hSL-A100-N5) comprising derived and/or modified sequence from Pf(3D7)__XP_001351122.1__HsALB_Pf-CSP(19-272)_L(AAY)_Pf-CSP(310-3 27)_L(AAY)_Pf-CSP(346-375)_L(AAY)_PADRE_L(AAY)_P2 (opt6)
aggagaaagcuuaccaugaaaugggucaccuucaucucacuacuauuuuuauucuccagcgcauacucauuauuccaagaauaccaaugcuauggcucaagcucaaacacaagaguauuaaacgaacuaaacuacgauaacgccggaacaaaccuauacaacgaacucgaaaugaacuacuauggaaaacaagaaaacugguacucacuuaaaaaaaauucaagaucucuaggagaaaacgacgacggaaacaaugaagacaacgagaaauuaagaaaaccaaaacacaaaaaacuaaaacaaccagcagacggaaacccagacccaaacgcaaacccaaacguagacccaaacgcaaacccaaacguagacccaaacgcaaacccaaacguagauccgaacgcaaauccaaacgcaaauccaaacgcaaacccaaaugcaaacccaaaugcaaacccaaaugcaaacccaaacgcaaacccaaacgcaaacccaaacgcaaaccccaacgcaaacccaaacgcaaauccaaacgcaaacccaaacgcaaacccaaacgcaaaccccaacgcaaacccaaacgcaaacccgaacgcgaacccaaacguggauccaaacgcaaacccaaaugcaaaucccaacgcaaacccaaaugcaaacccaaacgcaaacccaaacgcaaacccaaacgcaaacccaaaugcaaacccaaacgcaaacccaaacgcaaacccaaacgcaaacccaaacgcaaauccaaacgcaaauccaaaugcaaacccaaacgcaaacccaaacgcaaaccccaacgcaaauccaaacgcaaacccagccgcauacgaaccaucagacaaacauauaaaagaauaucuaaacaaaauucaaaacucacucgcagcauacauaaaaccaggaagcgcaaacaaaccuaaagacgaacuagacuacgcaaacgacauagaaaaaaaaauaugcaaaauggaaaaaugcucagcagcguacgcaaaauucguagcagcauggacacuaaaagcagcagccgcagcauaccaauacauaaaagcaaauucaaaauucaucggaauuacagaacuauaaggacuaguuauaagacugacuagcccgaugggccucccaacgggcccuccuccccuccuugcaccgagauuaaucaaaggcucuuuucagagccaccaaaaaaaaaaaaaaaaaaaaaaaaaaaaaaaaaaaaaaaaaaaaaaaaaaaaaaaaaaaaaaaaaaaaaaaaaaaaaaaaaaaaaaaaaaaaaaaaaaaaagaauu

SEQ ID NO: 9761 - RNA, 1265 nt, Artificial Sequence
  mRNA Design i-3 (hSL-A100-N5) comprising derived and/or modified sequence from Pf(3D7)__XP_001351122.1__HsALB_Pf-CSP(19-272)_L(AAY)_Pf-CSP(310-3 27)_Linker (AAY)_Pf-CSP(346-397) (opt6)
aggagaaagcuuaccaugaaauggguuacauucauaucauuacuauuccucuuuuccucagcauacucacucuuucaagaauaccaaugcuacggcucauccucaaacacaagaguacucaacgaacucaacuaugacaacgcaggaacaaaccucuacaacgaacuugaaaugaauuacuauggaaaacaagaaaacugguacucauuaaaaaaaaacucaagauccuuaggcgaaaacgacgacggaaacaacgaagacaacgagaaacuccgaaaaccaaaacacaaaaaacuaaaacaaccagcagacggaaacccagacccaaacgcaaacccaaacguagacccaaacgcaaacccaaacguagacccaaacgcaaacccaaacguagacccaaacgcaaacccaaacgcaaacccaaacgcaaacccaaacgcaaacccaaacgcaaacccaaacgcaaacccaaacgcaaacccaaacgcaaacccaaacgcaaacccaaacgcaaacccaaacgccaacccaaacgcaaacccaaacgccaacccaaacgcaaacccaaacgcaaacccaaacgcaaauccaaacgccaacccaaacguagacccaaacgcaaacccaaacgcaaacccaaacgcaaacccaaacgcaaaccccaacgccaacccaaacgccaaccccaacgcaaauccaaacgcaaacccaaacgcaaaccccaacgcaaacccaaacgcaaacccaaacgcaaacccaaacgcuaacccaaacgcaaaccccaacgcaaauccaaacgcaaacccaaacgcaaacccaaaugcaaacccagcagcauaugaaccuucagauaaacacauaaaagaauaccuaaacaaaauccaaaacucucucgcagccuacaucaaaccaggaucagcaaacaaacccaaagacgaacuagacuacgcaaaugauaucgaaaaaaaaauaugcaaaauggaaaaaugcucgagcguauuuaacguaguaaacucaucaaucggacucauaaugguacuaucauuucuauuccucaacuaaggacuaguuauaagacugacuagcccgaugggccucccaacgggcccuccuccccuccuugcaccgagauuaaucaaaggcucuuuucagagccaccaaaaaaaaaaaaaaaaaaaaaaaaaaaaaaaaaaaaaaaaaaaaaaaaaaaaaaaaaaaaaaaaaaaaaaaaaaaaaaaaaaaaaaaaaaaaaaaaaaaaagaauu

SEQ ID NO: 9762 - RNA, 1865 nt, Artificial Sequence
  mRNA Design i-3 (hSL-A100-N5) comprising derived and/or modified sequence from Pf(3D7)__XP_001351122.1__LumSynt_L(GGS4-GGG)_Pf-CSP(19-397) (opt11)
aggagaaagcuuaccaugcaaauauacgagggcaaacucacggcugaaggccuacgcuuuggcaucgucgcaucacgguucaaucacgcacucguggacaggcucguagaaggugccaucgacgcaauaguacgccacggcgggcgcgaagaggacauaacgcuaguacgcguacccggaagcugggaaauccccguagccgcaggcgaacucgcacgcaaagaagacaucgacgccgugaucgcaauaggaguccugauccgaggcgcaacaccacacuucgacuacaucgccuccgaagucucaaaaggccuagcggaucugagccucgaacugcgcaaaccuauaacauucggcgucauaacagccgacacauuagaacaggccauagaaagagccggaaccaaacauggaaacaaaggcugggaagcggcccuaagcgccaucgaaauggcaaaccucuucaaaagccugcgcggaggaucaggcggcagcggcggcuccggaggaagcggcggcggucuuuuucaagaauaccaaugcuacggcuccucaucgaacacacgcguacucaaugaacugaacuacgacaaugcaggaaccaaccucuacaacgaacucgagaugaacuacuacggcaaacaagaaaacugguacucgcuaaagaaaaacuccagaucccugggcgaaaacgacgacggaaacaacgaagacaacgaaaaacuacgcaaaccaaaacacaagaaacuaaaacaaccagcagacggaaacccagacccaaacgcgaacccaaacgucgacccaaacgcaaacccaaacguagacccaaacgcaaacccaaacgucgaccccaacgcaaacccaaacgccaaccccaacgcaaaccccaacgcgaacccaaacgcgaaccccaacgcaaacccaaacgcaaaccccaacgcaaacccaaacgcaaacccaaacgccaacccgaaugccaacccgaacgcaaacccgaacgcaaaccccaacgcgaaccccaacgcaaacccaaaugccaaccccaacgcaaaccccaacguagacccgaacgcaaacccgaacgcaaacccgaacgcaaacccaaacgcaaacccaaacgccaaccccaacgccaacccaaacgcgaacccaaaugcaaaccccaacgccaacccgaacgccaacccaaacgcaaacccgaacgcaaaccccaacgcaaaccccaacgcaaaccccaacgcaaacccgaacgccaacccaaacgcaaacccaaacgcaaacccaaacaaaaacaaccaaggaaacgggcaaggccacaacaugcccaacgacccaaaccgaaauguagaugaaaacgcaaacgccaacagcgcggucaaaaacaacaacaacgaagaacccucggacaaacacauaaaagaauaccuaaacaaaauccagaacucccucucaacagaauggucccccugcucaguuaccugcgguaaugguauacaaguccgcauuaaaccgggaucugccaacaaaccaaaagaugagcuagacuacgccaacgacauagaaaagaaaaucugcaaaauggagaaaugcuccucagucuucaacguaguaaacagcucgauagggcucaucaugguacucuccuuuuuauuccucaacuaaggacuaguuauaagacugacuagcccgaugggccucccaacgggcccuccuccccuccuugcaccgagauuaaucaaaggcucuuuucagagccaccaaaaaaaaaaaaaaaaaaaaaaaaaaaaaaaaaaaaaaaaaaaaaaaaaaaaaaaaaaaaaaaaaaaaaaaaaaaaaaaaaaaaaaaaaaaaaaaaaaaaagaauu

SEQ ID NO: 9763 - RNA, 1727 nt, Artificial Sequence
  mRNA Design i-3 (hSL-A100-N5) comprising derived and/or modified sequence from Pf(3D7)__XP_001351122.1__HsALB_Pf-CSP(19-272)_L(PVTN)_HBsAg (opt11)
aggagaaagcuuaccaugaaaugggucaccuucaucucccuccucuuccucuucuccucugccuacucacucuuccaagaauaccaaugcuacggcuccucuuccaacacccgcguacucaacgaacucaacuaugacaaugcaggaaccaaccuauacaacgagcuagagaugaacuacuacggcaaacaagaaaacugguacucccucaagaaaaacucacgcucccuuggcgaaaaugacgacggcaacaacgaagacaacgaaaaacuucgcaaacccaaacacaagaaauuaaaacaaccagccgacggcaacccagaccccaacgccaaccccaacgucgaccccaacgccaacccuaacgucgaccccaacgcaaacccuaacgucgauccaaacgccaaccccaacgcuaaccccaacgcaaauccgaacgcaaaccccaacgccaacccuaacgccaaccccaacgccaacccaaacgccaaccccaacgcuaaccccaacgcaaacccgaacgccaaccccaacgccaaccccaacgcaaaccccaacgccaaccccaaugcaaaccccaacgccaacccaaaugccaaccccaacgucgaccccaacgcaaaccccaacgcuaacccuaacgcuaacccaaacgccaacccaaacgcuaaccccaacgccaaccccaacgccaaccccaacgcaaacccaaacgcaaacccuaacgccaacccuaacgcaaaccccaacgcgaaccccaacgcaaaccccaacgcaaaccccaacgccaaccccaacgccaacccaaacgccaauccaaacgcaaaucccccagucaccaacauggaaaacaucaccucaggcuuccucggcccccuucucguccuacaagcugguuucuuccuucuaacccgcauccucacgaucccccaaucccucgacucaugguggaccucacucaacuuucucggaggcucacccguaugccucggacaaaacucccaaucccccaccuccaaccauuccccaaccucaugcccaccaauaugccccggcuaccguuggaugugccuccgccguuucaucauauuccuuuucauacuccuccucugccucaucuuccugcucgugcuccuagacuaucaagguaugcuacccguaugcccacucauccccggcucaaccacgacaaacacuggccccugcaaaacaugcaccacacccgcacaaggaaacuccauguuccccucaugcugcugcaccaaaccaacagacggaaacuguaccugcaucccuauccccuccuccugggccuucgcaaaauaucuaugggagugggccagcguacgcuuuuccuggcuuucccuccugguccccuucguccaaugguucguaggccucuccccaaccguauggcuauccgcaaucuggaugaugugguacuggggcccaucucucuacucaauaguaucacccuucaucccacuccuccccaucuucuucugccucuggguauacaucuaaggacuaguuauaagacugacuagcccgaugggccucccaacgggcccuccuccccuccuugcaccgagauuaaucaaaggcucuuuucagagccaccaaaaaaaaaaaaaaaaaaaaaaaaaaaaaaaaaaaaaaaaaaaaaaaaaaaaaaaaaaaaaaaaaaaaaaaaaaaaaaaaaaaaaaaaaaaaaaaaaaaaagaauu

SEQ ID NO: 9764 - RNA, 1844 nt, Artificial Sequence
  mRNA Design i-3 (hSL-A100-N5) comprising derived and/or modified sequence from Pf(3D7)__XP_001351122.1__HsALB_Pf-CSP(19-272)_L(AAY)_Pf-CSP(346-3 65)_L(AAY)_PADRE_L(PVTN)_HBsAg (opt11)
aggagaaagcuuaccaugaaauggguaaccuucauaucccuucuauucuuauucucuuccgcauacucccucuuccaagaauaucagugcuacggcucauccucaaacacacgaguccucaacgaacucaacuacgacaacgccggcaccaaucucuacaacgaacucgaaaugaacuacuacggcaaacaagaaaacugguacucccuuaagaaaaacucacgcucucucggcgaaaacgacgacggcaacaacgaagacaacgaaaaauuacgcaaacccaaacacaagaaacucaaacaaccagccgacggcaacccagaccccaaugcaaacccuaacgucgaccccaacgccaacccuaacgucgacccaaacgccaacccgaacgucgaccccaacgcaaacccaaacgccaaccccaaugccaaucccaacgccaacccuaacgccaaccccaacgccaaccccaacgccaacccuaacgccaaccccaaugcaaacccaaacgccaacccaaacgcaaacccaaacgccaauccaaacgccaacccaaacgccaaccccaacgccaacccaaacgccaaucccaacgccaaccccaacguagaccccaaugcgaacccaaacgccaacccuaacgccaaccccaacgcaaacccaaacgcuaacccaaacgcaaaccccaacgcaaaccccaacgcaaacccgaacgcgaaccccaacgccaauccaaacgcaaacccuaacgcaaacccaaacgccaacccaaacgccaacccaaacgcaaacccaaacgccaauccaaacgcaaacccgaacgcaaaccccgccgcuuacaucaaacccggaucggccaacaaacccaaagacgaacuugauuacgccaacgacaucgaagcagccuacgcaaaauucguagcggccuggacccuaaaagcagcagcacccgucacaaacauggaaaacaucacaucuggcuucuuaggcccacuccuaguccuccaggccggcuucuuccuacuaacccguauacucaccauaccacaaucacucgacucaugguggaccucccuaaacuuccucggcggaucacccgucugccugggccaaaacucgcaaucccccaccucaaaucauucgcccacaucaugcccgcccaucugccccggcuaccgguggaugugccuccgcagauucauaaucuuccucuucauacuacuacuuugccuaaucuuccucuuaguccuacucgacuaccaaggcaugcuccccgucugcccccuuauacccggcuccaccaccaccaauaccggccccugcaaaaccugcacaacacccgcccaaggcaacucaauguucccguccugcuguugcaccaaaccaaccgacggaaauugcacaugcaucccaauccccucaucaugggcauucgccaaauaccucugggaaugggccuccguccguuucuccuggcucagccuacucguucccuucguccaaugguuugucggccuuucaccuacaguauggcuauccgccauauggaugaugugguacuggggacccucacucuacucaauugucucccccuucaucccauuacuccccaucuucuucugccucugggucuacauauaaggacuaguuauaagacugacuagcccgaugggccucccaacgggcccuccuccccuccuugcaccgagauuaaucaaaggcucuuuucagagccaccaaaaaaaaaaaaaaaaaaaaaaaaaaaaaaaaaaaaaaaaaaaaaaaaaaaaaaaaaaaaaaaaaaaaaaaaaaaaaaaaaaaaaaaaaaaaaaaaaaaaagaauu

SEQ ID NO: 9765 - RNA, 2063 nt, Artificial Sequence
  mRNA Design i-3 (hSL-A100-N5) comprising derived and/or modified sequence from Pf(3D7)__XP_001351122.1__HsALB_Pf-CSP(19-384)_L(PVTN)_HBsAg (opt11)
aggagaaagcuuaccaugaaaugggucaccuucauaucacuccuauuccuauuuucaagcgccuacucccucuuccaagaauaucaaugcuauggcucaagcucaaacacccgcguccucaacgagcuaaacuacgacaacgcaggaaccaaccucuacaacgaacuggaaaugaacuacuacggaaaacaagagaacugguacuccuuaaagaaaaacucccgcucccucggcgaaaacgaugacgguaacaacgaagacaaugaaaaacuccgaaaacccaaacacaagaaacuaaaacaaccagccgacggaaaccccgacccgaacgcaaaccccaacguagacccaaacgcaaacccuaauguagacccaaacgccaacccaaacgucgacccaaacgcaaacccaaacgcuaaccccaacgccaacccaaacgccaaccccaacgccaaccccaaugccaacccaaacgcgaaccccaacgcaaaccccaacgccaacccgaacgccaacccaaacgccaacccaaacgccaaccccaacgcgaacccaaacgccaacccaaacgcuaaccccaacgcaaaccccaacgccaacccuaacgucgacccaaacgccaaucccaacgccaaccccaacgcaaaccccaacgccaacccgaacgcgaaccccaacgcaaaccccaacgcaaacccaaacgccaaccccaacgccaacccaaacgccaacccgaacgccaacccaaacgcgaaucccaaugccaaccccaacgccaauccuaaugcaaacccaaacgcaaaccccaacgccaauccgaacgcaaacccgaacaaaaacaaccaagguaacggccaaggccacaacaugcccaacgaccccaaccgcaacgucgacgaaaacgcaaacgccaacuccgcaguuaaaaacaacaacaacgaagaaccaucagacaaacacauaaaagaauaccucaacaaaauccaaaacucgcucuccaccgaauggucccccuguagcguaaccugcgguaauggaauacaaguccgaaucaaaccaggcucugccaacaaacccaaagacgaacuagacuacgccaacgacauugaaaagaaaaucugcaaaauggaaaaauguagcuccgucuucaacguagucaacuccucccccguuaccaacauggagaacauaaccuccggcuuccucggcccccuucucgugcuacaggccggauucuuccuccuaaccaggauccuaaccaucccccagucacucgacuccugguggaccucacucaacuuccucggcggaucccccgucugccucggacaaaacucccaaucccccaccucaaaccacuccccaaccucuugcccgcccauaugccccgguuaccgcuggaugugccuucgccgcuucaucauauuucuauucauccuccuucucugccuaauauuccuacucguacuccucgacuaccaaggcaugcuacccgucugcccucuuauacccggauccacgacaaccaacaccggccccugcaaaaccugcaccacacccgcccaaggcaacucuauguuccccucaugcugcugcacaaaacccaccgacggcaacugcacaugcauaccaauccccucuuccugggccuuugccaaauaccuuugggaaugggcuuccguccguuuuuccugguuaucccuccuggucccauucguccaaugguucgucggccuuucaccaaccgucuggcuauccgccaucuggaugaugugguacuggggucccucccucuacagcaucgucucaccauuuaucccccuccugcccaucuucuucugcuuguggguauacauaugaggacuaguuauaagacugacuagcccgaugggccucccaacgggcccuccuccccuccuugcaccgagauuaaucaaaggcucuuuucagagccaccaaaaaaaaaaaaaaaaaaaaaaaaaaaaaaaaaaaaaaaaaaaaaaaaaaaaaaaaaaaaaaaaaaaaaaaaaaaaaaaaaaaaaaaaaaaaaaaaaaaaagaauu

SEQ ID NO: 9766 - RNA, 1880 nt, Artificial Sequence
  mRNA Design i-3 (hSL-A100-N5) comprising derived and/or modified sequence from Pf(3D7)__XP_001351122.1__HsALB_Pf-CSP(19-384)_L(SGG)_Ferritin (opt11)
aggagaaagcuuaccaugaaaugggucaccuucauaucacuacuuuuccuguucuccucagcauacucacucuuccaagaguaccaaugcuacggcucaucauccaauacccgcguacuuaacgaauuaaacuacgacaacgcaggcaccaaccucuacaacgaacucgaaaugaacuauuacggaaaacaagaaaacugguacucacuaaagaaaaacagcagaucccucggcgaaaacgacgacggcaauaacgaagacaacgaaaaacugagaaaaccuaaacacaagaaacucaaacaacccgcagacggcaaccccgaccccaacgccaacccaaacguagaccccaacgccaaccccaacgucgaccccaacgccaacccuaaugucgacccaaacgcaaacccuaacgcaaaccccaaugccaacccaaacgccaaccccaacgcaaaccccaacgcaaauccaaacgcaaaucccaacgcaaaccccaaugccaaccccaacgcaaacccaaacgccaaccccaacgcaaaccccaacgcuaacccaaacgccaacccaaacgcaaacccaaacgccaaccccaacgcuaaccccaacgucgaccccaacgccaaccccaacgcaaacccaaacgccaaccccaaugcaaacccaaacgccaaccccaacgcaaacccaaacgccaacccaaacgccaaccccaacgcaaaccccaacgcuaaccccaacgcaaaccccaaugcaaacccgaacgccaacccaaacgcaaacccaaacgccaacccaaacgccaaccccaacgccaacccaaacgccaacccaaacaaaaacaaccaagguaacggacaaggccacaacaugcccaacgauccuaaccgcaacguagacgaaaacgccaacgcaaacagcgcagucaaaaacaacaacaacgaggaaccaucagacaaacacaucaaagaauaccucaacaaaauccaaaacucccuauccacagaauggucacccugcuccguaaccugcggcaacggcauccaaguacgcaucaaacccggauccgcaaacaaaccaaaagaugaauuagauuaugcaaacgacauagaaaagaaaauaugcaaaauggaaaaaugcuccuccguauucaacguagucaacuccucuucagggggacucuccaaagacaucaucaaacuucucaacgaacaagucaacaaagagaugaacagcuccaaccucuacaugucaaugucaagcuggugcuacacacacucacuggacggcgccggccucuuccuauucgaccacgccgcagaagaauacgaacacgccaagaaacuuauaaucuuccuaaacgaaaauaacguaccuguccaacucacaucaaucucggccccagaacauaaauucgaagggcucacgcaaauauuucaaaaagcauacgaacacgaacagcacaucuccgaaucaaucaacaacauugucgaccacgcaaucaaauccaaagaccacgccacauucaacuuccuacaaugguacguggccgaacaacacgaagaagaaguccucuucaaagacauacuagacaaaaucgaacuaaucggcaacgaaaaccacggccucuaccuagccgaccaauacguaaaaggaaucgcgaaaucccgcaaauccuaaggacuaguuauaagacugacuagcccgaugggccucccaacgggcccuccuccccuccuugcaccgagauuaaucaaaggcucuuuucagagccaccaaaaaaaaaaaaaaaaaaaaaaaaaaaaaaaaaaaaaaaaaaaaaaaaaaaaaaaaaaaaaaaaaaaaaaaaaaaaaaaaaaaaaaaaaaaaaaaaaaaaagaauu

SEQ ID NO: 9767 - RNA, 1841 nt, Artificial Sequence
  mRNA Design i-3 (hSL-A100-N5) comprising derived and/or modified sequence from Pf(3D7)__XP_001351122.1__HsALB_Pf-CSP(93-384)_L(PVTN)_HBsAg (opt11)
aggagaaagcuuaccaugaaaugggucaccuuuaucucacuccuauuucucuucucuuccgcauacuccaaacucaaacaacccgcagacggaaaccccgacccaaacgcaaaccccaacguagaccccaacgccaaccccaacgucgaccccaacgccaaccccaacguagaccccaacgcaaaccccaacgccaacccaaacgccaaccccaacgccaaccccaacgccaaucccaacgccaacccaaacgcaaaucccaacgcaaaccccaacgccaaccccaacgccaacccaaacgccaauccaaacgcaaacccuaacgccaacccuaacgcgaaccccaacgccaaccccaacgcaaaccccaacgccaaccccaaugucgaccccaacgccaaccccaacgccaaccccaacgcaaaccccaacgcaaacccaaacgccaaucccaacgccaaccccaacgcaaacccuaacgccaaccccaaugccaauccuaacgccaaccccaacgccaacccuaacgccaacccaaacgccaaccccaacgccaaccccaacgccaacccuaacgccaacccuaacgccaacccaaacgccaauccaaacaagaacaaccaaggcaacggucaaggccacaauaugccaaacgacccaaaccgaaacguagacgaaaacgccaacgccaacuccgccgucaaaaacaacaacaacgaagaacccuccgacaaacacaucaaagaauaucugaacaaaauccaaaacucccucuccaccgaauggucccccugcuccgucacuuguggcaauggcauacaaguccgcaucaaacccggcucagccaacaaacccaaagacgaacucgacuacgcaaacgacaucgaaaagaaaauaugcaaaauggaaaaaugcuccucugucuucaacgucgucaacuccucgcccguaaccaacauggaaaacaucaccucaggauuccucggcccccuacucguccuccaagccggcuucuuccuccucacccgaauccuuacaaucccccaaucccuugacucaugguggaccucccuuaauuuccucggcgguucccccgucugccuuggccaaaacucacaaucccccaccucaaaccacucccccacuuccugcccgcccauaugccccggcuaccgcuggaugugccuccgccgguucaucauauuccucuucauccuacuccucugccuuauauuucuauuaguccuccuagacuaccaaggaaugcuccccguaugcccacuaauccccggauccaccaccaccaacaccggccccugcaaaaccugcaccaccccugcacaaggaaacuccauguucccaucuuguugcugcacaaaaccaaccgacggcaacuguaccugcauccccaucccuucaucaugggccuucgccaaauaccuaugggaaugggccucaguacguuucuccuggcuaucccuccucgucccauucguucaaugguucgucggccuaucccccacgguauggcucuccgcaauauggaugaugugguacuggggccccucacuauacaguauaguuucccccuucauaccccuccuccccauauucuucugccucuggguauacaucuagggacuaguuauaagacugacuagcccgaugggccucccaacgggcccuccuccccuccuugcaccgagauuaaucaaaggcucuuuucagagccaccaaaaaaaaaaaaaaaaaaaaaaaaaaaaaaaaaaaaaaaaaaaaaaaaaaaaaaaaaaaaaaaaaaaaaaaaaaaaaaaaaaaaaaaaaaaaaaaaaaaaagaauu

SEQ ID NO: 9768 - RNA, 1502 nt, Artificial Sequence
  mRNA Design i-3 (hSL-A100-N5) comprising derived and/or modified sequence from Pf(3D7)__XP_001351122.1__HsALB_Pf-CSP(199-377)_L(PVTN)_HBsAg (opt11)
aggagaaagcuuaccaugaaauggguaaccuucaucucccuccuauucuuauucucaucagccuacuccgacccaaacgcaaaccccaaugccaaccccaacgccaaccccaacgccaaucccaacgccaaccccaacgccaaucccaaugcuaaccccaacgccaacccaaacgccaacccaaacgcaaaccccaacgccaaccccaacgccaaccccaacgccaacccaaacgccaaccccaacgcaaaccccaacgccaacccaaacgccaaccccaacgccaacccaaacaaaaacaaucaaggcaacggccaaggacacaacaugcccaacgaccccaaccgcaacgucgacgaaaacgcaaacgccaacucugcagucaaaaacaacaacaacgaagaacccuccgacaaacacauaaaagaauaccucaacaaaauccaaaacucccucuccacagaaugguccccaugcuccgucacgugcggcaacggcauccaaguacgcaucaaacccggcucugccaacaaaccuaaagacgaacucgacuacgccaacgacaucgaaaagaaaaucugcaaaauggaaaaaugcuccucaguccccguaacuaacauggaaaacaucacguccggcuuccucggcccccuccuaguccuccaagccggcuucuuccuacucacacgcauucuuaccaucccgcaaucacucgacuccugguggaccucccucaacuucuuaggcggcuccccugucugccucggccaaaacucacaaucccccacuucaaaccacucacccaccagcugcccacccauaugcccaggauaccgcuggaugugccuccgccguuucauaaucuuccucuucauacuccuacucugccuaaucuuccuccucguacuccuagacuaccaaggcaugcuccccgucugcccacucauccccggaagcacuacaaccaacaccggccccugcaaaacaugcaccacccccgcacaaggcaacuccauguuccccuccugcugcugcacaaaacccacugauggcaacugcacuugcauccccauccccuccucaugggccuucgccaaauaucucugggaaugggccagcguccgguucucuuggcucucacuccuaguccccuucguucaaugguucguaggccuaucccccaccgucuggcucuccgcaauauggaugaugugguauuggggccccucccucuacuccauuguaucccccuucaucccacuacuccccaucuucuucugccuuugggucuacauauaaggacuaguuauaagacugacuagcccgaugggccucccaacgggcccuccuccccuccuugcaccgagauuaaucaaaggcucuuuucagagccaccaaaaaaaaaaaaaaaaaaaaaaaaaaaaaaaaaaaaaaaaaaaaaaaaaaaaaaaaaaaaaaaaaaaaaaaaaaaaaaaaaaaaaaaaaaaaaaaaaaaaagaauu

SEQ ID NO: 9769 - RNA, 1199 nt, Artificial Sequence
  mRNA Design i-3 (hSL-A100-N5) comprising derived and/or modified sequence from Pf(3D7)__XP_001351122.1__HsALB_Pf-CSP(19-272)_L(AAY)_Pf-CSP(346-3 75)_L(AAY)_Pf-CSP(310-327) (opt11)
aggagaaagcuuaccaugaaauggguaaccuucaucucacuccuauuccuguucuccagugcauacucacucuuccaagaauaccaaugcuacggcuccagcagcaacacgcgaguccucaacgaacuaaacuacgauaacgccggaaccaaccuuuacaacgaacucgaaaugaacuacuacggcaaacaagaaaacugguacucacuaaaaaaaaacagcagaucacuaggcgaaaacgacgacggaaacaacgaagacaacgaaaaacuacgcaagcccaaacacaagaaacucaaacaacccgcagacggaaacccagaccccaacgcaaaccccaacguagaccccaacgcaaaccccaacguagaccccaacgcaaaucccaacguagacccaaacgcaaaccccaacgcaaacccaaacgcaaacccaaacgcgaacccaaacgcaaacccaaacgcaaacccgaacgccaacccaaacgcaaacccaaacgcuaaccccaacgcaaacccaaacgcaaacccaaacgcaaacccaaacgcaaacccaaacgcaaacccaaacgcaaacccgaacgcaaacccaaacgcaaaccccaacguagacccaaacgccaacccaaacgcaaaccccaacgccaacccaaacgcaaacccaaacgcaaacccaaacgcaaacccaaacgcaaacccaaacgcaaacccaaacgcaaaccccaacgcgaacccaaacgccaacccaaacgcaaacccaaacgcgaacccaaacgccaaccccaacgcaaaccccaacgcaaaccccaacgcaaacccaaacgcaaaccccgccgcuuacauaaaacccggcucggccaauaaaccaaaagacgaacucgacuacgccaacgacauagaaaaaaaaauaugcaaaauggaaaaaugcagcgccgccuacgaaccaucagacaaacacaucaaagaauaccucaacaaaauacaaaacagccucuaaggacuaguuauaagacugacuagcccgaugggccucccaacgggcccuccuccccuccuugcaccgagauuaaucaaaggcucuuuucagagccaccaaaaaaaaaaaaaaaaaaaaaaaaaaaaaaaaaaaaaaaaaaaaaaaaaaaaaaaaaaaaaaaaaaaaaaaaaaaaaaaaaaaaaaaaaaaaaaaaaaaaagaauu

SEQ ID NO: 9770 - RNA, 1247 nt, Artificial Sequence
  mRNA Design i-3 (hSL-A100-N5) comprising derived and/or modified sequence from Pf(3D7)__XP_001351122.1__HsALB_Pf-CSP(19-272)_L(AAY)_Pf-CSP(346-3 75)_L(AAY)_Pf-CSP(310-327)_L(AAY)_PADRE (opt11)
aggagaaagcuuaccaugaaauggguaacauuuaucucccuccucuuccucuuuuccuccgcauacucacucuuccaagaauaccaaugcuacggaucaagcuccaacacccgcguccuuaacgaacuuaacuacgacaacgccggcaccaacuuauacaacgaacucgagaugaacuacuacggcaaacaagaaaacugguacucccucaaaaaaaacuccagaucccucggcgaaaacgacgacggaaacaacgaagacaacgaaaaacuccgcaaacccaaacacaaaaaacucaaacaacccgcugacggcaacccugaccccaacgccaaccccaacguagaccccaacgccaaucccaacguagacccaaacgccaaccccaacguagaccccaacgccaaccccaacgcaaacccaaacgccaaccccaacgccaaccccaacgcgaacccaaacgccaaccccaacgccaacccuaacgccaacccgaacgccaaccccaacgccaaccccaacgccaaccccaacgcgaaccccaacgcaaaccccaacgccaaccccaacgcaaaccccaacgccaaccccaacgccaaccccaacguagaccccaacgccaacccaaacgccaacccaaacgcaaaccccaacgccaauccaaacgcaaaccccaacgcaaaccccaaugccaacccaaacgccaaccccaacgccaacccaaacgccaacccaaacgccaaccccaacgcaaacccaaacgcaaaccccaacgcaaacccuaacgccaacccaaacgccaacccaaacgcaaaccccaacgcaaaccccgccgccuacaucaaaccaggcuccgccaauaaaccaaaagacgaacucgacuacgcaaaugacauagaaaaaaaaauaugcaaaauggaaaaaugcuccgcagccuacgaacccagcgacaaacauaucaaagaauacuuaaacaaaauccaaaacucccuagccgccuacgccaaauucgucgcagccuggacccucaaagccgccgccuaaggacuaguuauaagacugacuagcccgaugggccucccaacgggcccuccuccccuccuugcaccgagauuaaucaaaggcucuuuucagagccaccaaaaaaaaaaaaaaaaaaaaaaaaaaaaaaaaaaaaaaaaaaaaaaaaaaaaaaaaaaaaaaaaaaaaaaaaaaaaaaaaaaaaaaaaaaaaaaaaaaaaagaauu

SEQ ID NO: 9771 - RNA, 1247 nt, Artificial Sequence
  mRNA Design i-3 (hSL-A100-N5) comprising derived and/or modified sequence from Pf(3D7)__XP_001351122.1__HsALB_Pf-CSP(19-272)_L(AAY)_Pf-CSP(310-3 27)_L(AAY)_Pf-CSP(346-375)_L(AAY)_PADRE (opt11)
aggagaaagcuuaccaugaaaugggugaccuuuaucucacuccucuuccucuucucaagcgcauacucacucuuccaagaauaccaaugcuacgguucaagcucaaacacaagaguccucaacgaacucaacuacgacaacgccggaaccaaccucuacaacgaacucgaaaugaacuacuacggcaaacaagaaaacugguacucacucaaaaaaaacagcaggucccuaggcgaaaacgacgacggaaacaacgaagacaacgaaaaacuccgcaaaccaaaacacaaaaaacugaaacaacccgcagacggaaacccagaccccaacgcaaacccgaacgucgacccgaacgccaacccaaacguagacccaaacgcaaaccccaacgucgacccaaacgcaaacccaaacgcaaacccaaacgcaaacccgaacgcaaacccaaacgcgaacccaaacgcaaacccaaacgcaaacccaaacgccaacccaaacgcaaacccaaaugcaaaccccaacgcaaacccgaacgcaaacccaaacgcaaaccccaacgcaaacccaaacgcuaacccaaacgcgaaccccaacgcaaacccaaacguggacccaaacgcaaacccaaacgcaaacccaaacgcgaacccgaacgcaaacccaaacgcgaacccaaacgcaaaccccaacgcaaacccaaacgcaaacccaaacgccaacccaaacgcaaacccaaacgcgaaccccaacgccaacccaaacgcaaacccaaacgcaaacccaaacgcaaacccaaacgcaaacccaaacgccaacccaaacgcaaacccagcugccuacgaacccuccgacaaacacaucaaagaguaccugaacaaaauccaaaacucccucgcagccuacaucaagcccggauccgcaaacaaacccaaagacgaacucgacuacgccaacgacauagaaaaaaaaaucugcaaaauggaaaaaugcucagccgcauacgcaaaauucguagcagccuggacccuaaaagcggcagcauaaggacuaguuauaagacugacuagcccgaugggccucccaacgggcccuccuccccuccuugcaccgagauuaaucaaaggcucuuuucagagccaccaaaaaaaaaaaaaaaaaaaaaaaaaaaaaaaaaaaaaaaaaaaaaaaaaaaaaaaaaaaaaaaaaaaaaaaaaaaaaaaaaaaaaaaaaaaaaaaaaaaaagaauu

SEQ ID NO: 9772 - RNA, 1301 nt, Artificial Sequence
  mRNA Design i-3 (hSL-A100-N5) comprising derived and/or modified sequence from Pf(3D7)__XP_001351122.1__HsALB_Pf-CSP(19-272)_L(AAY)_Pf-CSP(310-3 27)_L(AAY)_Pf-CSP(346-375)_L(AAY)_PADRE_L(AAY)_P2 (opt11)
aggagaaagcuuaccaugaaaugggugaccuucauaucacuauuauuccucuucucaagcgcauacucacucuuccaagaauaccaaugcuacggcuccuccucaaacacgcgcguacucaacgaacuaaacuacgacaacgccggaacaaaccucuacaacgaacuagaaaugaacuacuacggcaaacaagaaaacugguacucccuaaaaaaaaacucaagaucccuaggcgagaaugacgacggcaacaacgaagacaacgaaaaacuccgcaaacccaaacacaaaaaacucaaacaacccgccgacggaaacccagacccaaacgccaacccaaacgucgacccaaacgcaaaccccaacguagaccccaacgcaaacccaaacguagacccaaacgcaaacccaaacgcaaacccaaacgcaaaccccaacgccaacccaaacgcaaacccaaacgccaauccaaacgcaaacccaaaugccaacccaaacgcaaacccaaacgcaaacccaaacgccaaccccaacgcaaacccaaacgcaaacccaaacgccaacccaaacgcaaacccaaacgcaaaccccaacgccaacccgaacguagaccccaacgcaaaccccaacgcaaacccaaacgccaauccaaacgcaaaccccaacgcaaaccccaacgcaaaccccaacgccaauccaaacgccaaccccaacgcgaacccgaacgcaaacccaaacgcaaacccaaacgcaaacccaaacgcaaacccaaacgcaaacccaaacgcaaacccgaacgcaaaccccaacgccaacccaaacgcaaacccagccgcauacgaacccucagacaaacacauaaaagaauaccuaaacaaaauccaaaacucacucgcugccuacaucaaaccaggaagcgcaaacaaacccaaagacgaacucgauuacgccaacgacaucgaaaaaaaaaucugcaaaauggaaaaaugcuccgccgccuacgcaaaauucgucgcagccuggacucuaaaagccgccgcagccgcauaccaauacauaaaagccaacucaaaauucaucggaaucaccgaacuguaaggacuaguuauaagacugacuagcccgaugggccucccaacgggcccuccuccccuccuugcaccgagauuaaucaaaggcucuuuucagagccaccaaaaaaaaaaaaaaaaaaaaaaaaaaaaaaaaaaaaaaaaaaaaaaaaaaaaaaaaaaaaaaaaaaaaaaaaaaaaaaaaaaaaaaaaaaaaaaaaaaaaagaauu

SEQ ID NO: 9773 - RNA, 1265 nt, Artificial Sequence
  mRNA Design i-3 (hSL-A100-N5) comprising derived and/or modified sequence from Pf(3D7)__XP_001351122.1__HsALB_Pf-CSP(19-272)_L(AAY)_Pf-CSP(310-3 27)_Linker (AAY)_Pf-CSP(346-397) (opt11)
aggagaaagcuuaccaugaaaugggucaccuucaucucacuccuguuccuauucucgagcgcauacucccucuuccaagaauaccagugcuacggcucaagcucaaacacacgcguacucaacgaacuaaacuacgacaacgccggaaccaaccucuacaacgaacuagaaaugaacuacuacggcaaacaagagaacugguacucucuaaagaaaaacagcagaucccugggcgagaacgacgacggaaacaacgaagacaacgagaaacuacgcaaacccaaacacaagaaacuaaaacaacccgcagauggaaacccagauccaaacgcaaacccaaacgucgacccuaacgcaaaccccaacguagaccccaacgcaaaccccaacguagacccaaacgccaacccaaacgccaacccaaacgccaacccgaacgcaaaccccaaugccaacccaaacgccaacccgaacgccaacccaaacgcgaaccccaacgccaacccaaacgcaaacccaaacgcaaacccuaacgcaaaccccaacgccaacccaaaugccaacccaaacgcaaacccaaacgcaaacccaaacgccaaccccaacguagacccaaacgcaaaccccaacgcaaacccaaacgcaaacccaaacgccaacccaaacgcaaacccaaacgcaaacccaaacgcaaacccgaacgccaaccccaacgcaaacccaaacgcaaacccaaacgccaacccaaacgccaacccaaacgcaaaccccaacgcaaaccccaacgccaaccccaacgccaacccaaacgcaaacccaaacgcaaacccagccgcauacgaacccucagacaaacacauaaaagaauaccucaauaaaauccaaaacucacuugcagccuacauaaaaccaggcagcgcgaacaaacccaaagacgaacucgacuacgcgaacgacauagaaaagaaaaucugcaaaauggaaaaaugcucauccgucuucaaugucguaaacucauccauaggccuaaucaugguccucuccuuccuauuccucaacuaaggacuaguuauaagacugacuagcccgaugggccucccaacgggcccuccuccccuccuugcaccgagauuaaucaaaggcucuuuucagagccaccaaaaaaaaaaaaaaaaaaaaaaaaaaaaaaaaaaaaaaaaaaaaaaaaaaaaaaaaaaaaaaaaaaaaaaaaaaaaaaaaaaaaaaaaaaaaaaaaaaaaagaauu

SEQ ID NO: 9774 - RNA, 1919 nt, Artificial Sequence
  mRNA Design a-1 (hSL-A100) comprising derived and/or modified sequence from Pf(3D7)__XP_001351122.1__LumSynt_L(GGS4-GGG)_Pf-CSP(19-397) (opt1) R8783
aggagagucccgcagucggcguccagcggcucugcuuguucgugugugugucguugcaggccuuauucaagcuuaccaugcagaucuacgagggcaagcugaccgccgaggggcuccgcuucggcaucguggccagccgguucaaccacgcgcuggucgaccgccugguggagggggccaucgacgccaucgugcggcacggcgggcgcgaggaggacaucacccucguccgggugcccggcuccugggagaucccgguggccgccggcgagcuggcccgcaaggaggacaucgacgcggucaucgccaucggggugcugauccggggcgccacgccccacuucgacuacaucgccagcgagguguccaaggggcucgcggaccugagccuggagcuccgcaagcccaucaccuucggcgucaucaccgccgacacccuggagcaggccaucgagcgggccgggacgaagcacggcaacaagggcugggaggccgcgcuguccgccaucgagauggccaaccucuucaagagccugcgcggcgggagcggcggguccggcgggagcggcggcuccgggggcgggcuguuccaggaguaccagugcuacggcuccagcuccaacacccgggugcucaacgagcugaacuacgacaacgcggggaccaaccuguacaacgagcucgagaugaacuacuacggcaagcaggagaacugguacagccugaagaagaacucccgcagccugggggagaacgacgacggcaacaacgaggacaacgagaagcuccggaagcccaagcacaagaagcugaagcagccggccgacgggaaccccgaccccaacgccaaccccaacguggacccgaacgccaaccccaacgucgaccccaacgccaaccccaacguggacccgaacgcgaaccccaacgccaaccccaacgccaaccccaacgccaacccgaacgcgaaccccaacgccaaccccaacgccaaccccaacgccaacccgaacgccaaccccaacgcgaaccccaacgccaaccccaacgccaacccgaacgccaaccccaacgccaaccccaacgcgaaccccaacgccaacccgaacgccaaccccaacguggaccccaacgccaaccccaacgccaacccgaacgcgaaccccaacgccaaccccaacgccaacccgaacgccaaccccaacgccaaccccaacgcgaaccccaacgccaacccgaacgccaaccccaacgccaaccccaacgcgaaccccaacgccaacccgaacgccaaccccaacgccaaccccaacgccaaccccaacgcgaacccgaacgccaaccccaacaagaacaaccagggcaacggccaggggcacaacaugcccaacgaccccaaccgcaacgucgacgagaacgccaacgccaacuccgccgugaagaacaacaacaacgaggagccgagcgacaagcacaucaaggaguaccugaacaagauccagaacucccucagcacggaguggucccccugcagcgugaccugcggcaacgggauccagguccggaucaagcccggcuccgcgaacaagcccaaggacgagcuggacuacgccaacgacaucgagaagaagaucugcaagauggagaagugcagcuccguguucaacguggucaacagcuccaucgggcugaucauggugcucagcuuccuguuccugaacugaggacuagucccuguucccagagcccacuuuuuuuucuuuuuuugaaauaaaauagccugucuuucagaucucaaaggcucuuuucagagccaccaaaaaaaaaaaaaaaaaaaaaaaaaaaaaaaaaaaaaaaaaaaaaaaaaaaaaaaaaaaaaaaaaaaaaaaaaaaaaaaaaaaaaaaaaaaaaaaaaaaaa

SEQ ID NO: 9775 - RNA, 1466 nt, Artificial Sequence; identical to SEQ ID NO: 8019
  mRNA Design a-1 (hSL-A100) comprising derived and/or modified sequence from Pf(3D7)__XP_001351122.1__HsALB_Pf-CSP(19-397) (opt1) R8520/R8526

SEQ ID NO: 9776 - RNA, 1781 nt, Artificial Sequence
  mRNA Design a-1 (hSL-A100) comprising derived and/or modified sequence from Pf(3D7)__XP_001351122.1__HsALB_Pf-CSP(19-272)_L(PVTN)_HBsAg (opt1)
aggagagucccgcagucggcguccagcggcucugcuuguucgugugugugucguugcaggccuuauucaagcuuaccaugaagugggugaccuucaucagccugcucuuccuguucuccagcgccuacucccuguuccaggaguaccagugcuacggcuccagcuccaacacccgggugcucaacgagcugaacuacgacaacgcggggaccaaccuguacaacgagcucgagaugaacuacuacggcaagcaggagaacugguacagccugaagaagaacucccgcagccugggggagaacgacgacggcaacaacgaggacaacgagaagcuccggaagcccaagcacaagaagcugaagcagccggccgacgggaaccccgaccccaacgccaaccccaacguggacccgaacgccaaccccaacgucgaccccaacgccaaccccaacguggacccgaacgcgaaccccaacgccaaccccaacgccaaccccaacgccaacccgaacgcgaaccccaacgccaaccccaacgccaaccccaacgccaacccgaacgccaaccccaacgcgaaccccaacgccaaccccaacgccaacccgaacgccaaccccaacgccaaccccaacgcgaaccccaacgccaacccgaacgccaaccccaacguggaccccaacgccaaccccaacgccaacccgaacgcgaaccccaacgccaaccccaacgccaacccgaacgccaaccccaacgccaaccccaacgcgaaccccaacgccaacccgaacgccaaccccaacgccaaccccaacgcgaaccccaacgccaacccgaacgccaaccccaacgccaaccccaacgccaaccccaacgcgaacccgaacgccaaccccccggugacgaacauggagaacaucaccagcggcuuccuggggccccuccuggugcugcaggccggcuucuuccuccugacccgcauccugaccaucccgcagucccucgacagcugguggaccucccugaacuuccucgggggcagccccgucugccuggggcagaacucccagagccccaccuccaaccacagccccaccuccugcccgcccaucugccccggcuaccgguggaugugccugcgccgguucaucaucuuccuguucauccuccugcugugccucaucuuccugcuggugcuccuggacuaccagggcaugcugcccgugugcccgcucauccccgggagcacgaccaccaacaccggccccugcaagacgugcaccacccccgcccaggggaacuccauguucccgagcugcugcugcaccaagcccacggacggcaacugcacgugcauccccauccccuccagcugggcguucgccaaguaccugugggagugggccuccguccgcuucagcuggcugucccuccuggugccguucgugcagugguucgucgggcugagccccaccguguggcucuccgccaucuggaugaugugguacuggggccccagccuguacagcaucgugucccccuucaucccgcugcuccccaucuucuucugccugugggucuacaucugaggacuagucccuguucccagagcccacuuuuuuuucuuuuuuugaaauaaaauagccugucuuucagaucucaaaggcucuuuucagagccaccaaaaaaaaaaaaaaaaaaaaaaaaaaaaaaaaaaaaaaaaaaaaaaaaaaaaaaaaaaaaaaaaaaaaaaaaaaaaaaaaaaaaaaaaaaaaaaaaaaaaa

SEQ ID NO: 9777 - RNA, 1898 nt, Artificial Sequence
  mRNA Design a-1 (hSL-A100) comprising derived and/or modified sequence from Pf(3D7)__XP_001351122.1__HsALB_Pf-CSP(19-272)_L(AAY)_Pf-CSP(346-3 65)_L(AAY)_PADRE_L(PVTN)_HBsAg (opt1)
aggagagucccgcagucggcguccagcggcucugcuuguucgugugugugucguugcaggccuuauucaagcuuaccaugaagugggugaccuucaucagccugcucuuccuguucuccagcgccuacucccuguuccaggaguaccagugcuacggcuccagcuccaacacccgggugcucaacgagcugaacuacgacaacgcggggaccaaccuguacaacgagcucgagaugaacuacuacggcaagcaggagaacugguacagccugaagaagaacucccgcagccugggggagaacgacgacggcaacaacgaggacaacgagaagcuccggaagcccaagcacaagaagcugaagcagccggccgacgggaaccccgaccccaacgccaaccccaacguggacccgaacgccaaccccaacgucgaccccaacgccaaccccaacguggacccgaacgcgaaccccaacgccaaccccaacgccaaccccaacgccaacccgaacgcgaaccccaacgccaaccccaacgccaaccccaacgccaacccgaacgccaaccccaacgcgaaccccaacgccaaccccaacgccaacccgaacgccaaccccaacgccaaccccaacgcgaaccccaacgccaacccgaacgccaaccccaacguggaccccaacgccaaccccaacgccaacccgaacgcgaaccccaacgccaaccccaacgccaacccgaacgccaaccccaacgccaaccccaacgcgaaccccaacgccaacccgaacgccaaccccaacgccaaccccaacgcgaaccccaacgccaacccgaacgccaaccccaacgccaaccccaacgccaaccccaacgcgaacccgaacgccaaccccgccgcguauaucaagcccggcuccgcgaacaagcccaaggacgagcuggacuacgccaacgacaucgaggcggccuacgccaaguucguggccgccuggacccugaaggcggccgccccggugacgaacauggagaacaucaccagcggcuuccuggggccccuccuggugcugcaggccggcuucuuccuccugacccgcauccugaccaucccgcagucccucgacagcugguggaccucccugaacuuccucgggggcagccccgucugccuggggcagaacucccagagccccaccuccaaccacagccccaccuccugcccgcccaucugccccggcuaccgguggaugugccugcgccgguucaucaucuuccuguucauccuccugcugugccucaucuuccugcuggugcuccuggacuaccagggcaugcugcccgugugcccgcucauccccgggagcacgaccaccaacaccggccccugcaagacgugcaccacccccgcccaggggaacuccauguucccgagcugcugcugcaccaagcccacggacggcaacugcacgugcauccccauccccuccagcugggcguucgccaaguaccugugggagugggccuccguccgcuucagcuggcugucccuccuggugccguucgugcagugguucgucgggcugagccccaccguguggcucuccgccaucuggaugaugugguacuggggccccagccuguacagcaucgugucccccuucaucccgcugcuccccaucuucuucugccugugggucuacaucugaggacuagucccuguucccagagcccacuuuuuuuucuuuuuuugaaauaaaauagccugucuuucagaucucaaaggcucuuuucagagccaccaaaaaaaaaaaaaaaaaaaaaaaaaaaaaaaaaaaaaaaaaaaaaaaaaaaaaaaaaaaaaaaaaaaaaaaaaaaaaaaaaaaaaaaaaaaaaaaaaaaaa

SEQ ID NO: 9778 - RNA, 1898 nt, Artificial Sequence
  mRNA Design a-1 (hSL-A100) comprising derived and/or modified sequence from Pf(3D7)__XP_001351122.1__HsALB_Pf-CSP(19-272)_L(AAY)_Pf-CSP(346-3 65)_L(AAY)_PADRE_L(PVTN)_HBsAg (opt1) R8572
aggagagucccgcagucggcguccagcggcucugcuuguucgugugugugucguugcaggccuuauucaagcuuaccaugaagugggugaccuucaucagccuccuguuccuguucuccagcgccuacucccuguuccaggaguaccagugcuacggcuccagcuccaacacccgggugcucaacgagcugaacuacgacaacgcggggaccaaccuguacaacgagcucgagaugaacuacuacggcaagcaggagaacugguacagccugaagaagaacucccgcagccugggggagaacgacgacggcaacaacgaggacaacgagaagcuccggaagcccaagcacaagaagcugaagcagccggccgacgggaaccccgaccccaacgccaaccccaacguggacccgaacgccaaccccaacgucgaccccaacgccaaccccaacguggacccgaacgcgaaccccaacgccaaccccaacgccaaccccaacgccaacccgaacgcgaaccccaacgccaaccccaacgccaaccccaacgccaacccgaacgccaaccccaacgcgaaccccaacgccaaccccaacgccaacccgaacgccaaccccaacgccaaccccaacgcgaaccccaacgccaacccgaacgccaaccccaacguggaccccaacgccaaccccaacgccaacccgaacgcgaaccccaacgccaaccccaacgccaacccgaacgccaaccccaacgccaaccccaacgcgaaccccaacgccaacccgaacgccaaccccaacgccaaccccaacgcgaaccccaacgccaacccgaacgccaaccccaacgccaaccccaacgccaaccccaacgcgaacccgaacgccaaccccgccgcguauaucaagcccggcuccgcgaacaagcccaaggacgagcuggacuacgccaacgacaucgaggcggccuacgccaaguucguggccgccuggacccugaaggcggccgccccggugacgaacauggagaacaucaccagcggcuuccuggggccccuccuggugcugcaggccggcuucuuccuccugacccgcauccugaccaucccgcagucccucgacagcugguggaccucccugaacuuccucgggggcagccccgucugccuggggcagaacucccagagccccaccuccaaccacagccccaccuccugcccgcccaucugccccggcuaccgguggaugugccugcgccgguucaucaucuuccuguucauccuccugcugugccucaucuuccugcuggugcuccuggacuaccagggcaugcugcccgugugcccgcucauccccgggagcacgaccaccaacaccggccccugcaagacgugcaccacccccgcccaggggaacuccauguucccgagcugcugcugcaccaagcccacggacggcaacugcacgugcauccccauccccuccagcugggcguucgccaaguaccugugggagugggccuccguccgcuucagcuggcugucccuccuggugccguucgugcagugguucgucgggcugagccccaccguguggcucuccgccaucuggaugaugugguacuggggccccagccuguacagcaucgugucccccuucaucccgcugcuccccaucuucuucugccugugggucuacaucugaggacuagucccuguucccagagcccacuuuuuuuucuuuuuuugaaauaaaauagccugucuuucagaucucaaaggcucuuuucagagccaccaaaaaaaaaaaaaaaaaaaaaaaaaaaaaaaaaaaaaaaaaaaaaaaaaaaaaaaaaaaaaaaaaaaaaaaaaaaaaaaaaaaaaaaaaaaaaaaaaaaaa

SEQ ID NO: 9779 - RNA, 2117 nt, Artificial Sequence
  mRNA Design a-1 (hSL-A100) comprising derived and/or modified sequence from Pf(3D7)__XP_001351122.1__HsALB_Pf-CSP(19-384)_L(PVTN)_HBsAg (opt1)
aggagagucccgcagucggcguccagcggcucugcuuguucgugugugugucguugcaggccuuauucaagcuuaccaugaagugggugaccuucaucagccugcucuuccuguucuccagcgccuacucccuguuccaggaguaccagugcuacggcuccagcuccaacacccgggugcucaacgagcugaacuacgacaacgcggggaccaaccuguacaacgagcucgagaugaacuacuacggcaagcaggagaacugguacagccugaagaagaacucccgcagccugggggagaacgacgacggcaacaacgaggacaacgagaagcuccggaagcccaagcacaagaagcugaagcagccggccgacgggaaccccgaccccaacgccaaccccaacguggacccgaacgccaaccccaacgucgaccccaacgccaaccccaacguggacccgaacgcgaaccccaacgccaaccccaacgccaaccccaacgccaacccgaacgcgaaccccaacgccaaccccaacgccaaccccaacgccaacccgaacgccaaccccaacgcgaaccccaacgccaaccccaacgccaacccgaacgccaaccccaacgccaaccccaacgcgaaccccaacgccaacccgaacgccaaccccaacguggaccccaacgccaaccccaacgccaacccgaacgcgaaccccaacgccaaccccaacgccaacccgaacgccaaccccaacgccaaccccaacgcgaaccccaacgccaacccgaacgccaaccccaacgccaaccccaacgcgaaccccaacgccaacccgaacgccaaccccaacgccaaccccaacgccaaccccaacgcgaacccgaacgccaaccccaacaagaacaaccagggcaacggccaggggcacaacaugcccaacgaccccaaccgcaacgucgacgagaacgccaacgccaacuccgccgugaagaacaacaacaacgaggagccgagcgacaagcacaucaaggaguaccugaacaagauccagaacucccucagcacggaguggucccccugcagcgugaccugcggcaacgggauccagguccggaucaagcccggcuccgcgaacaagcccaaggacgagcuggacuacgccaacgacaucgagaagaagaucugcaagauggagaagugcagcuccguguucaacguggucaacagcuccccggugacgaacauggagaacaucaccagcggcuuccuggggccccuccuggugcugcaggccggcuucuuccuccugacccgcauccugaccaucccgcagucccucgacagcugguggaccucccugaacuuccucgggggcagccccgucugccuggggcagaacucccagagccccaccuccaaccacagccccaccuccugcccgcccaucugccccggcuaccgguggaugugccugcgccgguucaucaucuuccuguucauccuccugcugugccucaucuuccugcuggugcuccuggacuaccagggcaugcugcccgugugcccgcucauccccgggagcacgaccaccaacaccggccccugcaagacgugcaccacccccgcccaggggaacuccauguucccgagcugcugcugcaccaagcccacggacggcaacugcacgugcauccccauccccuccagcugggcguucgccaaguaccugugggagugggccuccguccgcuucagcuggcugucccuccuggugccguucgugcagugguucgucgggcugagccccaccguguggcucuccgccaucuggaugaugugguacuggggccccagccuguacagcaucgugucccccuucaucccgcugcuccccaucuucuucugccugugggucuacaucugaggacuagucccuguucccagagcccacuuuuuuuucuuuuuuugaaauaaaauagccugucuuucagaucucaaaggcucuuuucagagccaccaaaaaaaaaaaaaaaaaaaaaaaaaaaaaaaaaaaaaaaaaaaaaaaaaaaaaaaaaaaaaaaaaaaaaaaaaaaaaaaaaaaaaaaaaaaaaaaaaaaaa

SEQ ID NO: 9780 - RNA, 2117 nt, Artificial Sequence
  mRNA Design a-1 (hSL-A100) comprising derived and/or modified sequence from Pf(3D7)__XP_001351122.1__HsALB_Pf-CSP(19-384)_L(PVTN)_HBsAg (opt1) R8566
aggagagucccgcagucggcguccagcggcucugcuuguucgugugugugucguugcaggccuuauucaagcuuaccaugaagugggugaccuucaucagccuccuguuccuguucuccagcgccuacucccuguuccaggaguaccagugcuacggcuccagcuccaacacccgggugcucaacgagcugaacuacgacaacgcggggaccaaccuguacaacgagcucgagaugaacuacuacggcaagcaggagaacugguacagccugaagaagaacucccgcagccugggggagaacgacgacggcaacaacgaggacaacgagaagcuccggaagcccaagcacaagaagcugaagcagccggccgacgggaaccccgaccccaacgccaaccccaacguggacccgaacgccaaccccaacgucgaccccaacgccaaccccaacguggacccgaacgcgaaccccaacgccaaccccaacgccaaccccaacgccaacccgaacgcgaaccccaacgccaaccccaacgccaaccccaacgccaacccgaacgccaaccccaacgcgaaccccaacgccaaccccaacgccaacccgaacgccaaccccaacgccaaccccaacgcgaaccccaacgccaacccgaacgccaaccccaacguggaccccaacgccaaccccaacgccaacccgaacgcgaaccccaacgccaaccccaacgccaacccgaacgccaaccccaacgccaaccccaacgcgaaccccaacgccaacccgaacgccaaccccaacgccaaccccaacgcgaaccccaacgccaacccgaacgccaaccccaacgccaaccccaacgccaaccccaacgcgaacccgaacgccaaccccaacaagaacaaccagggcaacggccaggggcacaacaugcccaacgaccccaaccgcaacgucgacgagaacgccaacgccaacuccgccgugaagaacaacaacaacgaggagccgagcgacaagcacaucaaggaguaccugaacaagauccagaacucccucagcacggaguggucccccugcagcgugaccugcggcaacgggauccagguccggaucaagcccggcuccgcgaacaagcccaaggacgagcuggacuacgccaacgacaucgagaagaagaucugcaagauggagaagugcagcuccguguucaacguggucaacagcuccccggugacgaacauggagaacaucaccagcggcuuccuggggccccuccuggugcugcaggccggcuucuuccuccugacccgcauccugaccaucccgcagucccucgacagcugguggaccucccugaacuuccucgggggcagccccgucugccuggggcagaacucccagagccccaccuccaaccacagccccaccuccugcccgcccaucugccccggcuaccgguggaugugccugcgccgguucaucaucuuccuguucauccuccugcugugccucaucuuccugcuggugcuccuggacuaccagggcaugcugcccgugugcccgcucauccccgggagcacgaccaccaacaccggccccugcaagacgugcaccacccccgcccaggggaacuccauguucccgagcugcugcugcaccaagcccacggacggcaacugcacgugcauccccauccccuccagcugggcguucgccaaguaccugugggagugggccuccguccgcuucagcuggcugucccuccuggugccguucgugcagugguucgucgggcugagccccaccguguggcucuccgccaucuggaugaugugguacuggggccccagccuguacagcaucgugucccccuucaucccgcugcuccccaucuucuucugccugugggucuacaucugaggacuagucccuguucccagagcccacuuuuuuuucuuuuuuugaaauaaaauagccugucuuucagaucucaaaggcucuuuucagagccaccaaaaaaaaaaaaaaaaaaaaaaaaaaaaaaaaaaaaaaaaaaaaaaaaaaaaaaaaaaaaaaaaaaaaaaaaaaaaaaaaaaaaaaaaaaaaaaaaaaaaa

SEQ ID NO: 9781 - RNA, 1934 nt, Artificial Sequence
  mRNA Design a-1 (hSL-A100) comprising derived and/or modified sequence from Pf(3D7)__XP_001351122.1__HsALB_Pf-CSP(19-384)_L(SGG)_Ferritin (opt1)
aggagagucccgcagucggcguccagcggcucugcuuguucgugugugugucguugcaggccuuauucaagcuuaccaugaagugggugaccuucaucagccugcucuuccuguucuccagcgccuacucccuguuccaggaguaccagugcuacggcuccagcuccaacacccgggugcucaacgagcugaacuacgacaacgcggggaccaaccuguacaacgagcucgagaugaacuacuacggcaagcaggagaacugguacagccugaagaagaacucccgcagccugggggagaacgacgacggcaacaacgaggacaacgagaagcuccggaagcccaagcacaagaagcugaagcagccggccgacgggaaccccgaccccaacgccaaccccaacguggacccgaacgccaaccccaacgucgaccccaacgccaaccccaacguggacccgaacgcgaaccccaacgccaaccccaacgccaaccccaacgccaacccgaacgcgaaccccaacgccaaccccaacgccaaccccaacgccaacccgaacgccaaccccaacgcgaaccccaacgccaaccccaacgccaacccgaacgccaaccccaacgccaaccccaacgcgaaccccaacgccaacccgaacgccaaccccaacguggaccccaacgccaaccccaacgccaacccgaacgcgaaccccaacgccaaccccaacgccaacccgaacgccaaccccaacgccaaccccaacgcgaaccccaacgccaacccgaacgccaaccccaacgccaaccccaacgcgaaccccaacgccaacccgaacgccaaccccaacgccaaccccaacgccaaccccaacgcgaacccgaacgccaaccccaacaagaacaaccagggcaacggccaggggcacaacaugcccaacgaccccaaccgcaacgucgacgagaacgccaacgccaacuccgccgugaagaacaacaacaacgaggagccgagcgacaagcacaucaaggaguaccugaacaagauccagaacucccucagcacggaguggucccccugcagcgugaccugcggcaacgggauccagguccggaucaagcccggcuccgcgaacaagcccaaggacgagcuggacuacgccaacgacaucgagaagaagaucugcaagauggagaagugcagcuccguguucaacguggucaacagcuccagcggcgggcugagcaaggacaucaucaagcuccugaacgagcaggugaacaaggagaugaacuccagcaaccuguacauguccaugagcuccuggugcuacacccacagccucgacggcgccgggcuguuccuguucgaccacgccgcggaggaguacgagcacgccaagaagcucaucaucuuccugaacgagaacaacguccccgugcagcugaccuccaucagcgccccggagcacaaguucgagggccucacgcagaucuuccagaaggccuacgagcacgagcagcacaucuccgagagcaucaacaacaucguggaccacgccaucaaguccaaggaccacgcgaccuucaacuuccugcagugguacgucgccgagcagcacgaggaggaggugcuguucaaggacauccucgacaagaucgagcugaucgggaacgagaaccacggccuguaccucgccgaccaguacgugaaggggaucgccaagagccgcaaguccugaggacuagucccuguucccagagcccacuuuuuuuucuuuuuuugaaauaaaauagccugucuuucagaucucaaaggcucuuuucagagccaccaaaaaaaaaaaaaaaaaaaaaaaaaaaaaaaaaaaaaaaaaaaaaaaaaaaaaaaaaaaaaaaaaaaaaaaaaaaaaaaaaaaaaaaaaaaaaaaaaaaaa

SEQ ID NO: 9782 - RNA, 1934 nt, Artificial Sequence
  mRNA Design a-1 (hSL-A100) comprising derived and/or modified sequence from Pf(3D7)__XP_001351122.1__HsALB_Pf-CSP(19-384)_L(SGG)_Ferritin (opt1) R8781
aggagagucccgcagucggcguccagcggcucugcuuguucgugugugugucguugcaggccuuauucaagcuuaccaugaagugggugaccuucaucagccuccuguuccuguucuccagcgccuacucccuguuccaggaguaccagugcuacggcuccagcuccaacacccgggugcucaacgagcugaacuacgacaacgcggggaccaaccuguacaacgagcucgagaugaacuacuacggcaagcaggagaacugguacagccugaagaagaacucccgcagccugggggagaacgacgacggcaacaacgaggacaacgagaagcuccggaagcccaagcacaagaagcugaagcagccggccgacgggaaccccgaccccaacgccaaccccaacguggacccgaacgccaaccccaacgucgaccccaacgccaaccccaacguggacccgaacgcgaaccccaacgccaaccccaacgccaaccccaacgccaacccgaacgcgaaccccaacgccaaccccaacgccaaccccaacgccaacccgaacgccaaccccaacgcgaaccccaacgccaaccccaacgccaacccgaacgccaaccccaacgccaaccccaacgcgaaccccaacgccaacccgaacgccaaccccaacguggaccccaacgccaaccccaacgccaacccgaacgcgaaccccaacgccaaccccaacgccaacccgaacgccaaccccaacgccaaccccaacgcgaaccccaacgccaacccgaacgccaaccccaacgccaaccccaacgcgaaccccaacgccaacccgaacgccaaccccaacgccaaccccaacgccaaccccaacgcgaacccgaacgccaaccccaacaagaacaaccagggcaacggccaggggcacaacaugcccaacgaccccaaccgcaacgucgacgagaacgccaacgccaacuccgccgugaagaacaacaacaacgaggagccgagcgacaagcacaucaaggaguaccugaacaagauccagaacucccucagcacggaguggucccccugcagcgugaccugcggcaacgggauccagguccggaucaagcccggcuccgcgaacaagcccaaggacgagcuggacuacgccaacgacaucgagaagaagaucugcaagauggagaagugcagcuccguguucaacguggucaacagcuccagcggcgggcugagcaaggacaucaucaagcuccugaacgagcaggugaacaaggagaugaacuccagcaaccuguacauguccaugagcuccuggugcuacacccacagccucgacggcgccgggcuguuccuguucgaccacgccgcggaggaguacgagcacgccaagaagcucaucaucuuccugaacgagaacaacguccccgugcagcugaccuccaucagcgccccggagcacaaguucgagggccucacgcagaucuuccagaaggccuacgagcacgagcagcacaucuccgagagcaucaacaacaucguggaccacgccaucaaguccaaggaccacgcgaccuucaacuuccugcagugguacgucgccgagcagcacgaggaggaggugcuguucaaggacauccucgacaagaucgagcugaucgggaacgagaaccacggccuguaccucgccgaccaguacgugaaggggaucgccaagagccgcaaguccugaggacuagucccuguucccagagcccacuuuuuuuucuuuuuuugaaauaaaauagccugucuuucagaucucaaaggcucuuuucagagccaccaaaaaaaaaaaaaaaaaaaaaaaaaaaaaaaaaaaaaaaaaaaaaaaaaaaaaaaaaaaaaaaaaaaaaaaaaaaaaaaaaaaaaaaaaaaaaaaaaaaaa

SEQ ID NO: 9783 - RNA, 1895 nt, Artificial Sequence
  mRNA Design a-1 (hSL-A100) comprising derived and/or modified sequence from Pf(3D7)__XP_001351122.1__HsALB_Pf-CSP(93-384)_L(PVTN)_HBsAg (opt1)
aggagagucccgcagucggcguccagcggcucugcuuguucgugugugugucguugcaggccuuauucaagcuuaccaugaagugggugaccuucaucagccugcucuuccuguucuccagcgccuacuccaagcugaagcagccggccgacgggaaccccgaccccaacgccaaccccaacguggacccgaacgccaaccccaacgucgaccccaacgccaaccccaacguggacccgaacgcgaaccccaacgccaaccccaacgccaaccccaacgccaacccgaacgcgaaccccaacgccaaccccaacgccaaccccaacgccaacccgaacgccaaccccaacgcgaaccccaacgccaaccccaacgccaacccgaacgccaaccccaacgccaaccccaacgcgaaccccaacgccaacccgaacgccaaccccaacguggaccccaacgccaaccccaacgccaacccgaacgcgaaccccaacgccaaccccaacgccaacccgaacgccaaccccaacgccaaccccaacgcgaaccccaacgccaacccgaacgccaaccccaacgccaaccccaacgcgaaccccaacgccaacccgaacgccaaccccaacgccaaccccaacgccaaccccaacgcgaacccgaacgccaaccccaacaagaacaaccagggcaacggccaggggcacaacaugcccaacgaccccaaccgcaacgucgacgagaacgccaacgccaacuccgccgugaagaacaacaacaacgaggagccgagcgacaagcacaucaaggaguaccugaacaagauccagaacucccucagcacggaguggucccccugcagcgugaccugcggcaacgggauccagguccggaucaagcccggcuccgcgaacaagcccaaggacgagcuggacuacgccaacgacaucgagaagaagaucugcaagauggagaagugcagcuccguguucaacguggucaacagcuccccggugacgaacauggagaacaucaccagcggcuuccuggggccccuccuggugcugcaggccggcuucuuccuccugacccgcauccugaccaucccgcagucccucgacagcugguggaccucccugaacuuccucgggggcagccccgucugccuggggcagaacucccagagccccaccuccaaccacagccccaccuccugcccgcccaucugccccggcuaccgguggaugugccugcgccgguucaucaucuuccuguucauccuccugcugugccucaucuuccugcuggugcuccuggacuaccagggcaugcugcccgugugcccgcucauccccgggagcacgaccaccaacaccggccccugcaagacgugcaccacccccgcccaggggaacuccauguucccgagcugcugcugcaccaagcccacggacggcaacugcacgugcauccccauccccuccagcugggcguucgccaaguaccugugggagugggccuccguccgcuucagcuggcugucccuccuggugccguucgugcagugguucgucgggcugagccccaccguguggcucuccgccaucuggaugaugugguacuggggccccagccuguacagcaucgugucccccuucaucccgcugcuccccaucuucuucugccugugggucuacaucugaggacuagucccuguucccagagcccacuuuuuuuucuuuuuuugaaauaaaauagccugucuuucagaucucaaaggcucuuuucagagccaccaaaaaaaaaaaaaaaaaaaaaaaaaaaaaaaaaaaaaaaaaaaaaaaaaaaaaaaaaaaaaaaaaaaaaaaaaaaaaaaaaaaaaaaaaaaaaaaaaaaaa

SEQ ID NO: 9784 - RNA, 1895 nt, Artificial Sequence
  mRNA Design a-1 (hSL-A100) comprising derived and/or modified sequence from Pf(3D7)__XP_001351122.1__HsALB_Pf-CSP(93-384)_L(PVTN)_HBsAg (opt1) R8574
aggagagucccgcagucggcguccagcggcucugcuuguucgugugugugucguugcaggccuuauucaagcuuaccaugaagugggugaccuucaucagccuccuguuccuguucuccagcgccuacuccaagcugaagcagccggccgacgggaaccccgaccccaacgccaaccccaacguggacccgaacgccaaccccaacgucgaccccaacgccaaccccaacguggacccgaacgcgaaccccaacgccaaccccaacgccaaccccaacgccaacccgaacgcgaaccccaacgccaaccccaacgccaaccccaacgccaacccgaacgccaaccccaacgcgaaccccaacgccaaccccaacgccaacccgaacgccaaccccaacgccaaccccaacgcgaaccccaacgccaacccgaacgccaaccccaacguggaccccaacgccaaccccaacgccaacccgaacgcgaaccccaacgccaaccccaacgccaacccgaacgccaaccccaacgccaaccccaacgcgaaccccaacgccaacccgaacgccaaccccaacgccaaccccaacgcgaaccccaacgccaacccgaacgccaaccccaacgccaaccccaacgccaaccccaacgcgaacccgaacgccaaccccaacaagaacaaccagggcaacggccaggggcacaacaugcccaacgaccccaaccgcaacgucgacgagaacgccaacgccaacuccgccgugaagaacaacaacaacgaggagccgagcgacaagcacaucaaggaguaccugaacaagauccagaacucccucagcacggaguggucccccugcagcgugaccugcggcaacgggauccagguccggaucaagcccggcuccgcgaacaagcccaaggacgagcuggacuacgccaacgacaucgagaagaagaucugcaagauggagaagugcagcuccguguucaacguggucaacagcuccccggugacgaacauggagaacaucaccagcggcuuccuggggccccuccuggugcugcaggccggcuucuuccuccugacccgcauccugaccaucccgcagucccucgacagcugguggaccucccugaacuuccucgggggcagccccgucugccuggggcagaacucccagagccccaccuccaaccacagccccaccuccugcccgcccaucugccccggcuaccgguggaugugccugcgccgguucaucaucuuccuguucauccuccugcugugccucaucuuccugcuggugcuccuggacuaccagggcaugcugcccgugugcccgcucauccccgggagcacgaccaccaacaccggccccugcaagacgugcaccacccccgcccaggggaacuccauguucccgagcugcugcugcaccaagcccacggacggcaacugcacgugcauccccauccccuccagcugggcguucgccaaguaccugugggagugggccuccguccgcuucagcuggcugucccuccuggugccguucgugcagugguucgucgggcugagccccaccguguggcucuccgccaucuggaugaugugguacuggggccccagccuguacagcaucgugucccccuucaucccgcugcuccccaucuucuucugccugugggucuacaucugaggacuagucccuguucccagagcccacuuuuuuuucuuuuuuugaaauaaaauagccugucuuucagaucucaaaggcucuuuucagagccaccaaaaaaaaaaaaaaaaaaaaaaaaaaaaaaaaaaaaaaaaaaaaaaaaaaaaaaaaaaaaaaaaaaaaaaaaaaaaaaaaaaaaaaaaaaaaaaaaaaaaa

SEQ ID NO: 9785 - RNA, 1556 nt, Artificial Sequence; identical to SEQ ID NO: 8045
  mRNA Design a-1 (hSL-A100) comprising derived and/or modified sequence from Pf(3D7)__XP_001351122.1__HsALB_Pf-CSP(199-377)_L(PVTN)_HBsAg (opt1) R8564

SEQ ID NO: 9786 - RNA, 1253 nt, Artificial Sequence; identical to SEQ ID NO: 8029
  mRNA Design a-1 (hSL-A100) comprising derived and/or modified sequence from Pf(3D7)__XP_001351122.1__HsALB_Pf-CSP(19-272)_L(AAY)_Pf-CSP(310-3 27)_L(AAY)_Pf-CSP(346-375) (opt1)

SEQ ID NO: 9787 - RNA, 1253 nt, Artificial Sequence
  mRNA Design a-1 (hSL-A100) comprising derived and/or modified sequence from Pf(3D7)__XP_001351122.1__HsALB_Pf-CSP(19-272)_L(AAY)_Pf-CSP(346-3 75)_L(AAY)_Pf-CSP(310-327) (opt1)
aggagagucccgcagucggcguccagcggcucugcuuguucgugugugugucguugcaggccuuauucaagcuuaccaugaagugggugaccuucaucagccuccuguuccuguucuccagcgccuacucccuguuccaggaguaccagugcuacggcuccagcuccaacacccgggugcucaacgagcugaacuacgacaacgcggggaccaaccuguacaacgagcucgagaugaacuacuacggcaagcaggagaacugguacagccugaagaagaacucccgcagccugggggagaacgacgacggcaacaacgaggacaacgagaagcuccggaagcccaagcacaagaagcugaagcagccggccgacgggaaccccgaccccaacgccaaccccaacguggacccgaacgccaaccccaacgucgaccccaacgccaaccccaacguggacccgaacgcgaaccccaacgccaaccccaacgccaaccccaacgccaacccgaacgcgaaccccaacgccaaccccaacgccaaccccaacgccaacccgaacgccaaccccaacgcgaaccccaacgccaaccccaacgccaacccgaacgccaaccccaacgccaaccccaacgcgaaccccaacgccaacccgaacgccaaccccaacguggaccccaacgccaaccccaacgccaacccgaacgcgaaccccaacgccaaccccaacgccaacccgaacgccaaccccaacgccaaccccaacgcgaaccccaacgccaacccgaacgccaaccccaacgccaaccccaacgcgaaccccaacgccaacccgaacgccaaccccaacgccaaccccaacgccaaccccaacgcgaacccgaacgccaaccccgcggccuacaucaagcccggcuccgcgaacaagcccaaggacgagcuggacuacgccaacgacaucgagaagaagaucugcaagauggagaagugcagcgccgcguaugagccgagcgacaagcacaucaaggaguaccugaacaagauccagaacucccucugaggacuagucccuguucccagagcccacuuuuuuuucuuuuuuugaaauaaaauagccugucuuucagaucucaaaggcucuuuucagagccaccaaaaaaaaaaaaaaaaaaaaaaaaaaaaaaaaaaaaaaaaaaaaaaaaaaaaaaaaaaaaaaaaaaaaaaaaaaaaaaaaaaaaaaaaaaaaaaaaaaaaa

SEQ ID NO: 9788 - RNA, 1301 nt, Artificial Sequence
  mRNA Design a-1 (hSL-A100) comprising derived and/or modified sequence from Pf(3D7)__XP_001351122.1__HsALB_Pf-CSP(19-272)_L(AAY)_Pf-CSP(346-3 75)_L(AAY)_Pf-CSP(310-327)_L(AAY)_PADRE (opt1)
aggagagucccgcagucggcguccagcggcucugcuuguucgugugugugucguugcaggccuuauucaagcuuaccaugaagugggugaccuucaucagccuccuguuccuguucuccagcgccuacucccuguuccaggaguaccagugcuacggcuccagcuccaacacccgggugcucaacgagcugaacuacgacaacgcggggaccaaccuguacaacgagcucgagaugaacuacuacggcaagcaggagaacugguacagccugaagaagaacucccgcagccugggggagaacgacgacggcaacaacgaggacaacgagaagcuccggaagcccaagcacaagaagcugaagcagccggccgacgggaaccccgaccccaacgccaaccccaacguggacccgaacgccaaccccaacgucgaccccaacgccaaccccaacguggacccgaacgcgaaccccaacgccaaccccaacgccaaccccaacgccaacccgaacgcgaaccccaacgccaaccccaacgccaaccccaacgccaacccgaacgccaaccccaacgcgaaccccaacgccaaccccaacgccaacccgaacgccaaccccaacgccaaccccaacgcgaaccccaacgccaacccgaacgccaaccccaacguggaccccaacgccaaccccaacgccaacccgaacgcgaaccccaacgccaaccccaacgccaacccgaacgccaaccccaacgccaaccccaacgcgaaccccaacgccaacccgaacgccaaccccaacgccaaccccaacgcgaaccccaacgccaacccgaacgccaaccccaacgccaaccccaacgccaaccccaacgcgaacccgaacgccaaccccgccgcguauaucaagcccggcuccgcgaacaagcccaaggacgagcuggacuacgccaacgacaucgagaagaagaucugcaagauggagaagugcagcgcggccuacgagccgagcgacaagcacaucaaggaguaccugaacaagauccagaacucccucgccgccuacgccaaguucguggccgccuggacccugaaggcggccgccugaggacuagucccuguucccagagcccacuuuuuuuucuuuuuuugaaauaaaauagccugucuuucagaucucaaaggcucuuuucagagccaccaaaaaaaaaaaaaaaaaaaaaaaaaaaaaaaaaaaaaaaaaaaaaaaaaaaaaaaaaaaaaaaaaaaaaaaaaaaaaaaaaaaaaaaaaaaaaaaaaaaaa

SEQ ID NO: 9789 - RNA, 1301 nt, Artificial Sequence
  mRNA Design a-1 (hSL-A100) comprising derived and/or modified sequence from Pf(3D7)__XP_001351122.1__HsALB_Pf-CSP(19-272)_L(AAY)_Pf-CSP(310-3 27)_L(AAY)_Pf-CSP(346-375)_L(AAY)_PADRE (opt1)
aggagagucccgcagucggcguccagcggcucugcuuguucgugugugugucguugcaggccuuauucaagcuuaccaugaagugggugaccuucaucagccuccuguuccuguucuccagcgccuacucccuguuccaggaguaccagugcuacggcuccagcuccaacacccgggugcucaacgagcugaacuacgacaacgcggggaccaaccuguacaacgagcucgagaugaacuacuacggcaagcaggagaacugguacagccugaagaagaacucccgcagccugggggagaacgacgacggcaacaacgaggacaacgagaagcuccggaagcccaagcacaagaagcugaagcagccggccgacgggaaccccgaccccaacgccaaccccaacguggacccgaacgccaaccccaacgucgaccccaacgccaaccccaacguggacccgaacgcgaaccccaacgccaaccccaacgccaaccccaacgccaacccgaacgcgaaccccaacgccaaccccaacgccaaccccaacgccaacccgaacgccaaccccaacgcgaaccccaacgccaaccccaacgccaacccgaacgccaaccccaacgccaaccccaacgcgaaccccaacgccaacccgaacgccaaccccaacguggaccccaacgccaaccccaacgccaacccgaacgcgaaccccaacgccaaccccaacgccaacccgaacgccaaccccaacgccaaccccaacgcgaaccccaacgccaacccgaacgccaaccccaacgccaaccccaacgcgaaccccaacgccaacccgaacgccaaccccaacgccaaccccaacgccaaccccaacgcgaacccgaacgccaaccccgccgcguaugagccgagcgacaagcacaucaaggaguaccugaacaagauccagaacucccucgcggccuacaucaagcccggcuccgcgaacaagcccaaggacgagcuggacuacgccaacgacaucgagaagaagaucugcaagauggagaagugcagcgccgccuacgccaaguucguggccgccuggacccugaaggcggccgccugaggacuagucccuguucccagagcccacuuuuuuuucuuuuuuugaaauaaaauagccugucuuucagaucucaaaggcucuuuucagagccaccaaaaaaaaaaaaaaaaaaaaaaaaaaaaaaaaaaaaaaaaaaaaaaaaaaaaaaaaaaaaaaaaaaaaaaaaaaaaaaaaaaaaaaaaaaaaaaaaaaaaa

SEQ ID NO: 9790 - RNA, 1355 nt, Artificial Sequence
  mRNA Design a-1 (hSL-A100) comprising derived and/or modified sequence from Pf(3D7)__XP_001351122.1__HsALB_Pf-CSP(19-272)_L(AAY)_Pf-CSP(310-3 27)_L(AAY)_Pf-CSP(346-375)_L(AAY)_PADRE_L(AAY)_P2 (opt1)
aggagagucccgcagucggcguccagcggcucugcuuguucgugugugugucguugcaggccuuauucaagcuuaccaugaagugggugaccuucaucagccuccuguuccuguucuccagcgccuacucccuguuccaggaguaccagugcuacggcuccagcuccaacacccgggugcucaacgagcugaacuacgacaacgcggggaccaaccuguacaacgagcucgagaugaacuacuacggcaagcaggagaacugguacagccugaagaagaacucccgcagccugggggagaacgacgacggcaacaacgaggacaacgagaagcuccggaagcccaagcacaagaagcugaagcagccggccgacgggaaccccgaccccaacgccaaccccaacguggacccgaacgccaaccccaacgucgaccccaacgccaaccccaacguggacccgaacgcgaaccccaacgccaaccccaacgccaaccccaacgccaacccgaacgcgaaccccaacgccaaccccaacgccaaccccaacgccaacccgaacgccaaccccaacgcgaaccccaacgccaaccccaacgccaacccgaacgccaaccccaacgccaaccccaacgcgaaccccaacgccaacccgaacgccaaccccaacguggaccccaacgccaaccccaacgccaacccgaacgcgaaccccaacgccaaccccaacgccaacccgaacgccaaccccaacgccaaccccaacgcgaaccccaacgccaacccgaacgccaaccccaacgccaaccccaacgcgaaccccaacgccaacccgaacgccaaccccaacgccaaccccaacgccaaccccaacgcgaacccgaacgccaaccccgcggccuacgagccgagcgacaagcacaucaaggaguaccugaacaagauccagaacucccucgccgcguauaucaagcccggcuccgcgaacaagcccaaggacgagcuggacuacgccaacgacaucgagaagaagaucugcaagauggagaagugcagcgccgccuacgccaaguucguggccgccuggacccugaaggcggccgccgccgcuuaccaguacaucaaggccaacagcaaguucaucggcaucaccgagcugugaggacuagucccuguucccagagcccacuuuuuuuucuuuuuuugaaauaaaauagccugucuuucagaucucaaaggcucuuuucagagccaccaaaaaaaaaaaaaaaaaaaaaaaaaaaaaaaaaaaaaaaaaaaaaaaaaaaaaaaaaaaaaaaaaaaaaaaaaaaaaaaaaaaaaaaaaaaaaaaaaaaaa

SEQ ID NO: 9791 - RNA, 1319 nt, Artificial Sequence
  mRNA Design a-1 (hSL-A100) comprising derived and/or modified sequence from Pf(3D7)__XP_001351122.1__HsALB_Pf-CSP(19-272)_L(AAY)_Pf-CSP(310-3 27)_Linker (AAY)_Pf-CSP(346-397) (opt1)
aggagagucccgcagucggcguccagcggcucugcuuguucgugugugugucguugcaggccuuauucaagcuuaccaugaagugggugaccuucaucagccuccuguuccuguucuccagcgccuacucccuguuccaggaguaccagugcuacggcuccagcuccaacacccgggugcucaacgagcugaacuacgacaacgcggggaccaaccuguacaacgagcucgagaugaacuacuacggcaagcaggagaacugguacagccugaagaagaacucccgcagccugggggagaacgacgacggcaacaacgaggacaacgagaagcuccggaagcccaagcacaagaagcugaagcagccggccgacgggaaccccgaccccaacgccaaccccaacguggacccgaacgccaaccccaacgucgaccccaacgccaaccccaacguggacccgaacgcgaaccccaacgccaaccccaacgccaaccccaacgccaacccgaacgcgaaccccaacgccaaccccaacgccaaccccaacgccaacccgaacgccaaccccaacgcgaaccccaacgccaaccccaacgccaacccgaacgccaaccccaacgccaaccccaacgcgaaccccaacgccaacccgaacgccaaccccaacguggaccccaacgccaaccccaacgccaacccgaacgcgaaccccaacgccaaccccaacgccaacccgaacgccaaccccaacgccaaccccaacgcgaaccccaacgccaacccgaacgccaaccccaacgccaaccccaacgcgaaccccaacgccaacccgaacgccaaccccaacgccaaccccaacgccaaccccaacgcgaacccgaacgccaaccccgcggccuacgagccgagcgacaagcacaucaaggaguaccugaacaagauccagaacucccucgccgcguauaucaagcccggcuccgcgaacaagcccaaggacgagcuggacuacgccaacgacaucgagaagaagaucugcaagauggagaagugcagcuccguguucaacguggucaacagcuccaucgggcugaucauggugcucagcuuccuguuccugaacugaggacuagucccuguucccagagcccacuuuuuuuucuuuuuuugaaauaaaauagccugucuuucagaucucaaaggcucuuuucagagccaccaaaaaaaaaaaaaaaaaaaaaaaaaaaaaaaaaaaaaaaaaaaaaaaaaaaaaaaaaaaaaaaaaaaaaaaaaaaaaaaaaaaaaaaaaaaaaaaaaaaaa

SEQ ID NO: 9792 - RNA, 1919 nt, Artificial Sequence
  mRNA Design a-1 (hSL-A100) comprising derived and/or modified sequence from Pf(3D7)__XP_001351122.1__LumSynt_L(GGS4-GGG)_Pf-CSP(19-397) (opt1)
aggagagucccgcagucggcguccagcggcucugcuuguucgugugugugucguugcaggccuuauucaagcuuaccaugcagaucuacgagggcaagcugaccgccgaggggcuccgcuucggcaucguggccagccgguucaaccacgcgcuggucgaccgccugguggagggggccaucgacgccaucgugcggcacggcgggcgcgaggaggacaucacccucguccgggugcccggcuccugggagaucccgguggccgccggcgagcuggcgcgcaaggaggacaucgacgccgucaucgccaucggggugcugauccggggcgccacgccccacuucgacuacaucgcgagcgagguguccaaggggcucgccgaccugagccuggagcuccgcaagcccaucaccuucggcgucaucaccgccgacacccuggagcaggccaucgagcgggccgggacgaagcacggcaacaagggcugggaggcggcccuguccgccaucgagauggccaaccucuucaagagccugcgcgggggcuccgggggcagcggcggguccggcgggagcggcgggggccuguuccaggaguaccagugcuacggcuccagcuccaacacccgggugcucaacgagcugaacuacgacaacgccgggaccaaccuguacaacgagcucgagaugaacuacuacggcaagcaggagaacugguacagccugaagaagaacucccgcagccugggggagaacgacgacggcaacaacgaggacaacgagaagcuccggaagcccaagcacaagaagcugaagcagccggcggacgggaaccccgaccccaacgccaaccccaacguggacccgaacgccaaccccaacgucgaccccaacgccaaccccaacguggacccgaacgccaaccccaacgcgaaccccaacgccaaccccaacgccaacccgaacgccaaccccaacgccaaccccaacgcgaaccccaacgccaacccgaacgccaaccccaacgccaaccccaacgcgaaccccaacgccaacccgaacgccaaccccaacgccaaccccaacgccaaccccaacgcgaacccgaacgccaaccccaacguggaccccaacgccaacccgaacgccaaccccaacgccaaccccaacgcgaaccccaacgccaacccgaacgccaaccccaacgccaaccccaacgccaaccccaacgcgaacccgaacgccaaccccaacgccaaccccaacgccaaccccaacgcgaacccgaacgccaaccccaacgccaaccccaacgccaaccccaacgccaacccgaacgcgaaccccaacaagaacaaccagggcaacggccaggggcacaacaugcccaacgaccccaaccgcaacgucgacgagaacgccaacgccaacuccgccgugaagaacaacaacaacgaggagccgagcgacaagcacaucaaggaguaccugaacaagauccagaacucccucagcaccgaguggagccccugcuccgugacgugcggcaacgggauccagguccggaucaagcccggcagcgccaacaagcccaaggacgagcuggacuacgcgaacgacaucgagaagaagaucugcaagauggagaagugcuccagcguguucaacguggucaacuccagcaucgggcugaucauggugcucuccuuccuguuccugaacugaggacuagucccuguucccagagcccacuuuuuuuucuuuuuuugaaauaaaauagccugucuuucagaucucaaaggcucuuuucagagccaccaaaaaaaaaaaaaaaaaaaaaaaaaaaaaaaaaaaaaaaaaaaaaaaaaaaaaaaaaaaaaaaaaaaaaaaaaaaaaaaaaaaaaaaaaaaaaaaaaaaaa

SEQ ID NO: 9793 - RNA, 1781 nt, Artificial Sequence
  mRNA Design a-1 (hSL-A100) comprising derived and/or modified sequence from Pf(3D7)__XP_001351122.1__HsALB_Pf-CSP(19-272)_L(PVTN)_HBsAg (opt1)
aggagagucccgcagucggcguccagcggcucugcuuguucgugugugugucguugcaggccuuauucaagcuuaccaugaagugggugaccuucaucagccuccuguuccuguucuccagcgccuacucccuguuccaggaguaccagugcuacggcagcuccagcaacacccgcguccucaacgagcugaacuacgacaacgccgggaccaaccuguacaacgagcucgagaugaacuacuacggcaagcaggagaacugguacucccugaagaagaacagccggucccugggggagaacgacgacggcaacaacgaggacaacgagaagcuccgcaagcccaagcacaagaagcugaagcagccggcggacgggaaccccgaccccaacgccaaccccaacguggacccgaacgccaaccccaacguggaccccaacgccaaccccaacgucgacccgaacgccaaccccaacgcgaaccccaacgccaaccccaacgccaacccgaacgccaaccccaacgcgaaccccaacgccaaccccaacgccaacccgaacgccaaccccaacgccaaccccaacgcgaaccccaacgccaacccgaacgccaaccccaacgccaaccccaacgccaaccccaacgcgaacccgaacgccaaccccaacguggaccccaacgccaaccccaacgccaacccgaacgccaaccccaacgcgaaccccaacgccaacccgaacgccaaccccaacgccaaccccaacgccaaccccaacgcgaacccgaacgccaaccccaacgccaaccccaacgccaaccccaacgcgaacccgaacgccaaccccaacgccaaccccaacgccaaccccaacgccaacccgaacgcgaacccgcccgugaccaacauggagaacaucaccagcggcuuccugggcccccuccugguccugcaggccggguucuuccuccugacccggauccugacgaucccccagucccucgacagcugguggaccucccugaacuuccugggcgggagccccgugugccucggccagaacucccagagccccaccuccaaccacagccccaccuccugcccgcccaucugccccggguaccgcuggaugugccugcggcgcuucaucaucuuccuguucauccuccugcugugccucaucuuccugcuggugcuccuggacuaccagggcaugcugcccgucugcccgcucauccccggcagcacgaccaccaacaccgggcccugcaagacgugcaccaccccggcccagggcaacagcauguuccccuccugcugcugcaccaagcccacggacgggaacugcacgugcauccccaucccgagcuccugggccuucgccaaguaccugugggagugggcgagcgugcgguucuccuggcugagccuccuggugcccuucguccagugguucgugggccugucccccaccguguggcucagcgccaucuggaugaugugguacuggggccccucccuguacagcaucgucuccccguucaucccccugcuccccaucuucuucugccuguggguguacaucugaggacuagucccuguucccagagcccacuuuuuuuucuuuuuuugaaauaaaauagccugucuuucagaucucaaaggcucuuuucagagccaccaaaaaaaaaaaaaaaaaaaaaaaaaaaaaaaaaaaaaaaaaaaaaaaaaaaaaaaaaaaaaaaaaaaaaaaaaaaaaaaaaaaaaaaaaaaaaaaaaaaaa

SEQ ID NO: 9794 - RNA, 1898 nt, Artificial Sequence
  mRNA Design a-1 (hSL-A100) comprising derived and/or modified sequence from Pf(3D7)__XP_001351122.1__HsALB_Pf-CSP(19-272)_L(AAY)_Pf-CSP(346-3 65)_L(AAY)_PADRE_L(PVTN)_HBsAg (opt1)
aggagagucccgcagucggcguccagcggcucugcuuguucgugugugugucguugcaggccuuauucaagcuuaccaugaagugggugaccuucaucagccugcuguuccuguucuccagcgccuacucccuguuccaggaguaccagugcuacggcagcuccagcaacacccgcguccucaacgagcugaacuacgacaacgccgggaccaaccuguacaacgagcucgagaugaacuacuacggcaagcaggagaacugguacucccugaagaagaacagccggucccugggggagaacgacgacggcaacaacgaggacaacgagaagcuccgcaagcccaagcacaagaagcugaagcagccggcggacgggaaccccgaccccaacgccaaccccaacguggacccgaacgccaaccccaacguggaccccaacgccaaccccaacgucgacccgaacgccaaccccaacgcgaaccccaacgccaaccccaacgccaacccgaacgccaaccccaacgcgaaccccaacgccaaccccaacgccaacccgaacgccaaccccaacgccaaccccaacgcgaaccccaacgccaacccgaacgccaaccccaacgccaaccccaacgccaaccccaacgcgaacccgaacgccaaccccaacguggaccccaacgccaaccccaacgccaacccgaacgccaaccccaacgcgaaccccaacgccaacccgaacgccaaccccaacgccaaccccaacgccaaccccaacgcgaacccgaacgccaaccccaacgccaaccccaacgccaaccccaacgcgaacccgaacgccaaccccaacgccaaccccaacgccaaccccaacgccaacccgaacgcgaaccccgccgccuacaucaagcccggcagcgccaacaagcccaaggacgagcuggacuacgccaacgacaucgaggcggccuacgccaaguucguggccgccuggacccucaaggcggccgccccggucaccaacauggagaacaucaccuccggcuuccuggggccccugcucgugcugcaggccggcuucuuccugcucacgcggauccugaccaucccccagagccuggacuccugguggaccagccucaacuuccucgggggcucccccgugugccuggggcagaacagccaguccccgaccagcaaccacucccccacgagcugcccgcccaucugccccggcuaccgcuggaugugccuccggcgcuucaucaucuuccuguucauccugcuccugugccugaucuuccuccugguccugcucgacuaccagggcaugcugcccgugugcccccugaucccggggagcaccaccaccaacacgggccccugcaagaccugcaccacccccgcgcaggggaacuccauguuccccagcugcugcugcacgaagccgaccgacggcaacugcacgugcauccccauccccuccagcugggccuucgccaaguaccucugggagugggccuccgugcgguucagcuggcugucccugcucguccccuucgugcagugguucgugggccugagcccgaccgucuggcuguccgccaucuggaugaugugguacugggggcccagccucuacuccaucgugagccccuucaucccccugcugccgaucuucuucugccucuggguguacaucugaggacuagucccuguucccagagcccacuuuuuuuucuuuuuuugaaauaaaauagccugucuuucagaucucaaaggcucuuuucagagccaccaaaaaaaaaaaaaaaaaaaaaaaaaaaaaaaaaaaaaaaaaaaaaaaaaaaaaaaaaaaaaaaaaaaaaaaaaaaaaaaaaaaaaaaaaaaaaaaaaaaaa

SEQ ID NO: 9795 - RNA, 2117 nt, Artificial Sequence
  mRNA Design a-1 (hSL-A100) comprising derived and/or modified sequence from Pf(3D7)__XP_001351122.1__HsALB_Pf-CSP(19-384)_L(PVTN)_HBsAg (opt1)
aggagagucccgcagucggcguccagcggcucugcuuguucgugugugugucguugcaggccuuauucaagcuuaccaugaagugggugaccuucaucagccugcuguuccuguucuccagcgccuacucccuguuccaggaguaccagugcuacggcagcuccagcaacacccgcguccucaacgagcugaacuacgacaacgccgggacgaaccuguacaacgagcucgagaugaacuacuacggcaagcaggagaacugguacucccugaagaagaacagccggucccugggggagaacgacgacggcaacaacgaggacaacgagaagcuccgcaagcccaagcacaagaagcugaagcagccggcggacgggaaccccgaccccaacgccaaccccaacguggacccgaacgccaaccccaacguggaccccaacgccaaccccaacgucgacccgaacgccaaccccaacgcgaaccccaacgccaaccccaacgccaacccgaacgccaaccccaacgcgaaccccaacgccaaccccaacgccaacccgaacgccaaccccaacgccaaccccaacgcgaaccccaacgccaacccgaacgccaaccccaacgccaaccccaacgccaaccccaacgcgaacccgaacgccaaccccaacguggaccccaacgccaaccccaacgccaacccgaacgccaaccccaacgcgaaccccaacgccaacccgaacgccaaccccaacgccaaccccaacgccaaccccaacgcgaacccgaacgccaaccccaacgccaaccccaacgccaaccccaacgcgaacccgaacgccaaccccaacgccaaccccaacgccaaccccaacgccaacccgaacgcgaaccccaacaagaacaaccagggcaacggccaggggcacaacaugcccaacgaccccaaccggaacguggacgagaacgccaacgccaacagcgccgucaagaacaacaacaacgaggagccguccgacaagcacaucaaggaguaccugaacaagauccagaacagccucuccaccgaguggagccccugcuccgugaccugcggcaacgggauccaggugcgcaucaagcccggcagcgccaacaagcccaaggacgagcuggacuacgcgaacgacaucgagaagaagaucugcaagauggagaagugcuccagcgucuucaacguggugaacuccagcccggucaccaacauggagaacaucacgagcggguuccugggcccccuccuggugcugcaggccggcuucuuccuccugacccggauccugaccaucccccagucccucgacagcugguggaccucccugaacuuccucgggggcagccccgugugccucgggcagaacucccagagcccgacguccaaccacagccccaccuccugcccgcccaucugccccggcuaccgcuggaugugccugcggcgcuucaucaucuuccuguucauccuccugcugugccucaucuuccugcugguccuccuggacuaccagggcaugcugcccgugugcccccucaucccggggagcaccaccacgaacaccggccccugcaagaccugcaccacgcccgcccaggggaacuccauguuccccagcugcugcugcaccaagccgaccgacggcaacugcacgugcauccccauccccuccagcugggccuucgccaaguaccugugggagugggcguccgugcgguucagcuggcugucccuccugguccccuucgugcagugguucguggggcugagcccgaccgucuggcucuccgccaucuggaugaugugguacuggggccccagccuguacagcaucgugucccccuucaucccccugcucccgaucuucuucugccuguggguguacaucugaggacuagucccuguucccagagcccacuuuuuuuucuuuuuuugaaauaaaauagccugucuuucagaucucaaaggcucuuuucagagccaccaaaaaaaaaaaaaaaaaaaaaaaaaaaaaaaaaaaaaaaaaaaaaaaaaaaaaaaaaaaaaaaaaaaaaaaaaaaaaaaaaaaaaaaaaaaaaaaaaaaaa

SEQ ID NO: 9796 - RNA, 1934 nt, Artificial Sequence
  mRNA Design a-1 (hSL-A100) comprising derived and/or modified sequence from Pf(3D7)__XP_001351122.1__HsALB_Pf-CSP(19-384)_L(SGG)_Ferritin (opt1)
aggagagucccgcagucggcguccagcggcucugcuuguucgugugugugucguugcaggccuuauucaagcuuaccaugaagugggugaccuucaucagccuccuguuccuguucuccagcgccuacucccuguuccaggaguaccagugcuacggcagcuccagcaacacccggguccucaacgagcugaacuacgacaacgccgggacgaaccuguacaacgagcucgagaugaacuacuacggcaagcaggagaacugguacucccugaagaagaacagccggucccugggggagaacgacgacggcaacaacgaggacaacgagaagcuccgcaagcccaagcacaagaagcugaagcagccggcggacgggaaccccgaccccaacgccaaccccaacguggacccgaacgccaaccccaacguggaccccaacgccaaccccaacgucgacccgaacgccaaccccaacgcgaaccccaacgccaaccccaacgccaacccgaacgccaaccccaacgcgaaccccaacgccaaccccaacgccaacccgaacgccaaccccaacgccaaccccaacgcgaaccccaacgccaacccgaacgccaaccccaacgccaaccccaacgccaaccccaacgcgaacccgaacgccaaccccaacguggaccccaacgccaaccccaacgccaacccgaacgccaaccccaacgcgaaccccaacgccaacccgaacgccaaccccaacgccaaccccaacgccaaccccaacgcgaacccgaacgccaaccccaacgccaaccccaacgccaaccccaacgcgaacccgaacgccaaccccaacgccaaccccaacgccaaccccaacgccaacccgaacgcgaaccccaacaagaacaaccagggcaacggccaggggcacaacaugcccaacgaccccaaccggaacguggacgagaacgccaacgccaacagcgccgucaagaacaacaacaacgaggagccguccgacaagcacaucaaggaguaccugaacaagauccagaacagccucuccaccgaguggagccccugcuccgugaccugcggcaacgggauccaggugcgcaucaagcccggcagcgccaacaagcccaaggacgagcuggacuacgcgaacgacaucgagaagaagaucugcaagauggagaagugcuccagcgucuucaacguggugaacuccagcagcgggggccuguccaaggacaucaucaagcuccugaacgagcaggucaacaaggagaugaacagcuccaaccuguacaugagcauguccagcuggugcuacacccacucccucgacggcgccgggcuguuccuguucgaccacgccgccgaggaguacgagcacgccaagaagcucaucaucuuccugaacgagaacaacgugccggugcagcugacgagcaucuccgcgcccgagcacaaguucgagggccucacccagaucuuccagaaggccuacgagcacgagcagcacaucagcgaguccaucaacaacaucgucgaccacgccaucaagagcaaggaccacgccaccuucaacuuccugcagugguacguggcggagcagcacgaggaggaggugcuguucaaggacauccucgacaagaucgagcugaucgggaacgagaaccacggccuguaccucgccgaccaguacgucaagggcaucgccaagucccgcaagagcugaggacuagucccuguucccagagcccacuuuuuuuucuuuuuuugaaauaaaauagccugucuuucagaucucaaaggcucuuuucagagccaccaaaaaaaaaaaaaaaaaaaaaaaaaaaaaaaaaaaaaaaaaaaaaaaaaaaaaaaaaaaaaaaaaaaaaaaaaaaaaaaaaaaaaaaaaaaaaaaaaaaaa

SEQ ID NO: 9797 - RNA, 1895 nt, Artificial Sequence
  mRNA Design a-1 (hSL-A100) comprising derived and/or modified sequence from Pf(3D7)__XP_001351122.1__HsALB_Pf-CSP(93-384)_L(PVTN)_HBsAg (opt1)
aggagagucccgcagucggcguccagcggcucugcuuguucgugugugugucguugcaggccuuauucaagcuuaccaugaagugggugaccuucaucagccuccuguuccuguucuccagcgccuacuccaagcugaagcagcccgccgacggcaacccggaccccaacgcgaaccccaacgucgaccccaacgccaacccgaacguggaccccaacgccaaccccaacguggaccccaacgccaacccgaacgccaaccccaacgcgaaccccaacgccaaccccaacgccaacccgaacgccaaccccaacgcgaaccccaacgccaaccccaacgccaacccgaacgccaaccccaacgccaaccccaacgcgaaccccaacgccaacccgaacgccaaccccaacgccaaccccaacgccaaccccaacgcgaacccgaacgucgaccccaacgccaaccccaacgccaaccccaacgccaacccgaacgccaaccccaacgcgaaccccaacgccaacccgaacgccaaccccaacgccaaccccaacgccaaccccaacgcgaacccgaacgccaaccccaacgccaaccccaacgccaaccccaacgcgaacccgaacgccaaccccaacgccaaccccaacgccaaccccaacgccaacccgaacaagaacaaccaggggaacggccaggggcacaacaugcccaacgaccccaaccgcaacguggacgagaacgcgaacgccaacagcgccgugaagaacaacaacaacgaggagcccuccgacaagcacaucaaggaguaccucaacaagauccagaacagccuguccaccgaguggagcccgugcuccgugaccugcggcaacgggauccagguccggaucaagcccggcagcgccaacaagcccaaggacgagcuggacuacgccaacgacaucgagaagaagaucugcaagauggagaagugcuccagcguguucaacgucgugaacuccagccccgugaccaacauggagaacaucaccuccggcuuccucgggccgcugcugguccuccaggcgggcuucuuccugcugacccgcauccucacgaucccccagagccuggacuccugguggaccagccugaacuuccucgggggcucccccgugugccuggggcagaacagccagagccccaccuccaaccacagcccgaccuccugcccgcccaucugccccggcuaccgguggaugugccugcgccgguucaucaucuuccucuucauccugcugcucugccugaucuuccugcucgugcugcuggacuaccagggcaugcuccccgucugcccccugauccccgggagcacgaccaccaacaccggcccgugcaagacgugcaccacccccgcccaggggaacuccauguuccccagcugcugcugcaccaagcccacggacggcaacugcacgugcaucccgauccccuccagcugggccuucgccaaguaccugugggagugggccuccgugcgcuucagcuggcucucccugcuggugcccuucguccagugguucgugggccucagccccaccguguggcuguccgcgaucuggaugaugugguacugggggccgagccuguacuccaucgucagccccuucaucccccuccugcccaucuucuucugccuguggguguacaucugaggacuagucccuguucccagagcccacuuuuuuuucuuuuuuugaaauaaaauagccugucuuucagaucucaaaggcucuuuucagagccaccaaaaaaaaaaaaaaaaaaaaaaaaaaaaaaaaaaaaaaaaaaaaaaaaaaaaaaaaaaaaaaaaaaaaaaaaaaaaaaaaaaaaaaaaaaaaaaaaaaaaa

SEQ ID NO: 9798 - RNA, 1556 nt, Artificial Sequence; identical to SEQ ID NO: 8075
  mRNA Design a-1 (hSL-A100) comprising derived and/or modified sequence from Pf(3D7)__XP_001351122.1__HsALB_Pf-CSP(199-377)_L(PVTN)_HBsAg (opt1)

SEQ ID NO: 9799 - RNA, 1253 nt, Artificial Sequence
  mRNA Design a-1 (hSL-A100) comprising derived and/or modified sequence from Pf(3D7)__XP_001351122.1__HsALB_Pf-CSP(19-272)_L(AAY)_Pf-CSP(346-3 75)_L(AAY)_Pf-CSP(310-327) (opt1)
aggagagucccgcagucggcguccagcggcucugcuuguucgugugugugucguugcaggccuuauucaagcuuaccaugaagugggugaccuucaucagccuccuguuccuguucuccagcgccuacucccuguuccaggaguaccagugcuacggcagcuccagcaacacccgcguccucaacgagcugaacuacgacaacgccgggacgaaccuguacaacgagcucgagaugaacuacuacggcaagcaggagaacugguacucccugaagaagaacagccggucccugggggagaacgacgacggcaacaacgaggacaacgagaagcuccgcaagcccaagcacaagaagcugaagcagccggcggacgggaaccccgaccccaacgccaaccccaacguggacccgaacgccaaccccaacguggaccccaacgccaaccccaacgucgacccgaacgccaaccccaacgcgaaccccaacgccaaccccaacgccaacccgaacgccaaccccaacgcgaaccccaacgccaaccccaacgccaacccgaacgccaaccccaacgccaaccccaacgcgaaccccaacgccaacccgaacgccaaccccaacgccaaccccaacgccaaccccaacgcgaacccgaacgccaaccccaacguggaccccaacgccaaccccaacgccaacccgaacgccaaccccaacgcgaaccccaacgccaacccgaacgccaaccccaacgccaaccccaacgccaaccccaacgcgaacccgaacgccaaccccaacgccaaccccaacgccaaccccaacgcgaacccgaacgccaaccccaacgccaaccccaacgccaaccccaacgccaacccgaacgcgaaccccgccgccuacaucaagcccggcagcgccaacaagcccaaggacgagcuggacuacgccaacgacaucgagaagaagaucugcaagauggagaagugcuccgcggccuacgagccgagcgacaagcacaucaaggaguaccucaacaagauccagaacucccugugaggacuagucccuguucccagagcccacuuuuuuuucuuuuuuugaaauaaaauagccugucuuucagaucucaaaggcucuuuucagagccaccaaaaaaaaaaaaaaaaaaaaaaaaaaaaaaaaaaaaaaaaaaaaaaaaaaaaaaaaaaaaaaaaaaaaaaaaaaaaaaaaaaaaaaaaaaaaaaaaaaaaa

SEQ ID NO: 9800 - RNA, 1301 nt, Artificial Sequence
  mRNA Design a-1 (hSL-A100) comprising derived and/or modified sequence from Pf(3D7)__XP_001351122.1__HsALB_Pf-CSP(19-272)_L(AAY)_Pf-CSP(346-3 75)_L(AAY)_Pf-CSP(310-327)_L(AAY)_PADRE (opt1)
aggagagucccgcagucggcguccagcggcucugcuuguucgugugugugucguugcaggccuuauucaagcuuaccaugaagugggugaccuucaucagccuccuguuccuguucuccagcgccuacucccuguuccaggaguaccagugcuacggcagcuccagcaacacccgcguccucaacgagcugaacuacgacaacgccgggacgaaccuguacaacgagcucgagaugaacuacuacggcaagcaggagaacugguacucccugaagaagaacagccggucccugggggagaacgacgacggcaacaacgaggacaacgagaagcuccgcaagcccaagcacaagaagcugaagcagccggcggacgggaaccccgaccccaacgccaaccccaacguggacccgaacgccaaccccaacguggaccccaacgccaaccccaacgucgacccgaacgccaaccccaacgcgaaccccaacgccaaccccaacgccaacccgaacgccaaccccaacgcgaaccccaacgccaaccccaacgccaacccgaacgccaaccccaacgccaaccccaacgcgaaccccaacgccaacccgaacgccaaccccaacgccaaccccaacgccaaccccaacgcgaacccgaacgccaaccccaacguggaccccaacgccaaccccaacgccaacccgaacgccaaccccaacgcgaaccccaacgccaacccgaacgccaaccccaacgccaaccccaacgccaaccccaacgcgaacccgaacgccaaccccaacgccaaccccaacgccaaccccaacgcgaacccgaacgccaaccccaacgccaaccccaacgccaaccccaacgccaacccgaacgcgaaccccgccgccuacaucaagcccggcagcgccaacaagcccaaggacgagcuggacuacgccaacgacaucgagaagaagaucugcaagauggagaagugcuccgcggccuacgagccgagcgacaagcacaucaaggaguaccucaacaagauccagaacucccuggccgccuacgccaaguucguggcggccuggacccugaaggccgccgcgugaggacuagucccuguucccagagcccacuuuuuuuucuuuuuuugaaauaaaauagccugucuuucagaucucaaaggcucuuuucagagccaccaaaaaaaaaaaaaaaaaaaaaaaaaaaaaaaaaaaaaaaaaaaaaaaaaaaaaaaaaaaaaaaaaaaaaaaaaaaaaaaaaaaaaaaaaaaaaaaaaaaaa

SEQ ID NO: 9801 - RNA, 1301 nt, Artificial Sequence
  mRNA Design a-1 (hSL-A100) comprising derived and/or modified sequence from Pf(3D7)__XP_001351122.1__HsALB_Pf-CSP(19-272)_L(AAY)_Pf-CSP(310-3 27)_L(AAY)_Pf-CSP(346-375)_L(AAY)_PADRE (opt1)
aggagagucccgcagucggcguccagcggcucugcuuguucgugugugugucguugcaggccuuauucaagcuuaccaugaagugggugaccuucaucagccuccuguuccuguucuccagcgccuacucccuguuccaggaguaccagugcuacggcagcuccagcaacacccgcguccucaacgagcugaacuacgacaacgccgggacgaaccuguacaacgagcucgagaugaacuacuacggcaagcaggagaacugguacucccugaagaagaacagccggucccugggggagaacgacgacggcaacaacgaggacaacgagaagcuccgcaagcccaagcacaagaagcugaagcagccggcggacgggaaccccgaccccaacgccaaccccaacguggacccgaacgccaaccccaacguggaccccaacgccaaccccaacgucgacccgaacgccaaccccaacgcgaaccccaacgccaaccccaacgccaacccgaacgccaaccccaacgcgaaccccaacgccaaccccaacgccaacccgaacgccaaccccaacgccaaccccaacgcgaaccccaacgccaacccgaacgccaaccccaacgccaaccccaacgccaaccccaacgcgaacccgaacgccaaccccaacguggaccccaacgccaaccccaacgccaacccgaacgccaaccccaacgcgaaccccaacgccaacccgaacgccaaccccaacgccaaccccaacgccaaccccaacgcgaacccgaacgccaaccccaacgccaaccccaacgccaaccccaacgcgaacccgaacgccaaccccaacgccaaccccaacgccaaccccaacgccaacccgaacgcgaaccccgccgccuacgagcccagcgacaagcacaucaaggaguaccugaacaagauccagaacucccucgccgccuacaucaagcccggcagcgcgaacaagccgaaggacgagcuggacuacgccaacgacaucgagaagaagaucugcaagauggagaagugcuccgccgccuacgccaaguucguggcggccuggacccugaaggccgccgcgugaggacuagucccuguucccagagcccacuuuuuuuucuuuuuuugaaauaaaauagccugucuuucagaucucaaaggcucuuuucagagccaccaaaaaaaaaaaaaaaaaaaaaaaaaaaaaaaaaaaaaaaaaaaaaaaaaaaaaaaaaaaaaaaaaaaaaaaaaaaaaaaaaaaaaaaaaaaaaaaaaaaaa

SEQ ID NO: 9802 - RNA, 1355 nt, Artificial Sequence
  mRNA Design a-1 (hSL-A100) comprising derived and/or modified sequence from Pf(3D7)__XP_001351122.1__HsALB_Pf-CSP(19-272)_L(AAY)_Pf-CSP(310-3 27)_L(AAY)_Pf-CSP(346-375)_L(AAY)_PADRE_L(AAY)_P2 (opt1)
aggagagucccgcagucggcguccagcggcucugcuuguucgugugugugucguugcaggccuuauucaagcuuaccaugaagugggugaccuucaucagccuccuguuccuguucuccagcgccuacucccuguuccaggaguaccagugcuacggcagcuccagcaacacccgcguccucaacgagcugaacuacgacaacgccgggacgaaccuguacaacgagcucgagaugaacuacuacggcaagcaggagaacugguacucccugaagaagaacagccggucccugggggagaacgacgacggcaacaacgaggacaacgagaagcuccgcaagcccaagcacaagaagcugaagcagccggcggacgggaaccccgaccccaacgccaaccccaacguggacccgaacgccaaccccaacguggaccccaacgccaaccccaacgucgacccgaacgccaaccccaacgcgaaccccaacgccaaccccaacgccaacccgaacgccaaccccaacgcgaaccccaacgccaaccccaacgccaacccgaacgccaaccccaacgccaaccccaacgcgaaccccaacgccaacccgaacgccaaccccaacgccaaccccaacgccaaccccaacgcgaacccgaacgccaaccccaacguggaccccaacgccaaccccaacgccaacccgaacgccaaccccaacgcgaaccccaacgccaacccgaacgccaaccccaacgccaaccccaacgccaaccccaacgcgaacccgaacgccaaccccaacgccaaccccaacgccaaccccaacgcgaacccgaacgccaaccccaacgccaaccccaacgccaaccccaacgccaacccgaacgcgaaccccgccgccuacgagcccagcgacaagcacaucaaggaguaccugaacaagauccagaacucccucgccgccuacaucaagcccggcagcgcgaacaagccgaaggacgagcuggacuacgccaacgacaucgagaagaagaucugcaagauggagaagugcuccgccgccuacgccaaguucguggcggccuggacccugaaggccgccgcggccgccuaccaguacaucaaggccaacagcaaguucaucggcaucaccgagcucugaggacuagucccuguucccagagcccacuuuuuuuucuuuuuuugaaauaaaauagccugucuuucagaucucaaaggcucuuuucagagccaccaaaaaaaaaaaaaaaaaaaaaaaaaaaaaaaaaaaaaaaaaaaaaaaaaaaaaaaaaaaaaaaaaaaaaaaaaaaaaaaaaaaaaaaaaaaaaaaaaaaaa

SEQ ID NO: 9803 - RNA, 1319 nt, Artificial Sequence
  mRNA Design a-1 (hSL-A100) comprising derived and/or modified sequence from Pf(3D7)__XP_001351122.1__HsALB_Pf-CSP(19-272)_L(AAY)_Pf-CSP(310-3 27)_Linker (AAY)_Pf-CSP(346-397) (opt1)
aggagagucccgcagucggcguccagcggcucugcuuguucgugugugugucguugcaggccuuauucaagcuuaccaugaagugggugaccuucaucagccuccuguuccuguucuccagcgccuacucccuguuccaggaguaccagugcuacggcagcuccagcaacacccgcguccucaacgagcugaacuacgacaacgccgggacgaaccuguacaacgagcucgagaugaacuacuacggcaagcaggagaacugguacucccugaagaagaacagccggucccugggggagaacgacgacggcaacaacgaggacaacgagaagcuccgcaagcccaagcacaagaagcugaagcagccggcggacgggaaccccgaccccaacgccaaccccaacguggacccgaacgccaaccccaacguggaccccaacgccaaccccaacgucgacccgaacgccaaccccaacgcgaaccccaacgccaaccccaacgccaacccgaacgccaaccccaacgcgaaccccaacgccaaccccaacgccaacccgaacgccaaccccaacgccaaccccaacgcgaaccccaacgccaacccgaacgccaaccccaacgccaaccccaacgccaaccccaacgcgaacccgaacgccaaccccaacguggaccccaacgccaaccccaacgccaacccgaacgccaaccccaacgcgaaccccaacgccaacccgaacgccaaccccaacgccaaccccaacgccaaccccaacgcgaacccgaacgccaaccccaacgccaaccccaacgccaaccccaacgcgaacccgaacgccaaccccaacgccaaccccaacgccaaccccaacgccaacccgaacgcgaaccccgccgccuacgagcccagcgacaagcacaucaaggaguaccugaacaagauccagaacucccucgccgccuacaucaagcccggcagcgcgaacaagccgaaggacgagcuggacuacgccaacgacaucgagaagaagaucugcaagauggagaagugcuccagcguguucaacgucgugaacuccagcaucggccugaucauggugcucuccuuccuguuccugaacugaggacuagucccuguucccagagcccacuuuuuuuucuuuuuuugaaauaaaauagccugucuuucagaucucaaaggcucuuuucagagccaccaaaaaaaaaaaaaaaaaaaaaaaaaaaaaaaaaaaaaaaaaaaaaaaaaaaaaaaaaaaaaaaaaaaaaaaaaaaaaaaaaaaaaaaaaaaaaaaaaaaaa

SEQ ID NO: 9804 - RNA, 1919 nt, Artificial Sequence
  mRNA Design a-1 (hSL-A100) comprising derived and/or modified sequence from Pf(3D7)__XP_001351122.1__LumSynt_L(GGS4-GGG)_Pf-CSP(19-397) (opt2)
aggagagucccgcagucggcguccagcggcucugcuuguucgugugugugucguugcaggccuuauucaagcuuaccaugcagaucuacgagggcaagcucaccgccgagggccuccgcuucggcaucgucgccucccgcuucaaccacgcccucgucgaccgccucgucgagggcgccaucgacgccaucguccgccacggcggccgcgaggaggacaucacccucguccgcguccccggcuccugggagauccccgucgccgccggcgagcucgcccgcaaggaggacaucgacgccgucaucgccaucggcguccucauccgcggcgccaccccccacuucgacuacaucgccuccgaggucuccaagggccucgccgaccucucccucgagcuccgcaagcccaucaccuucggcgucaucaccgccgacacccucgagcaggccaucgagcgcgccggcaccaagcacggcaacaagggcugggaggccgcccucuccgccaucgagauggccaaccucuucaagucccuccgcggcggcuccggcggcuccggcggcuccggcggcuccggcggcggccucuuccaggaguaccagugcuacggcuccuccuccaacacccgcguccucaacgagcucaacuacgacaacgccggcaccaaccucuacaacgagcucgagaugaacuacuacggcaagcaggagaacugguacucccucaagaagaacucccgcucccucggcgagaacgacgacggcaacaacgaggacaacgagaagcuccgcaagcccaagcacaagaagcucaagcagcccgccgacggcaaccccgaccccaacgccaaccccaacgucgaccccaacgccaaccccaacgucgaccccaacgccaaccccaacgucgaccccaacgccaaccccaacgccaaccccaacgccaaccccaacgccaaccccaacgccaaccccaacgccaaccccaacgccaaccccaacgccaaccccaacgccaaccccaacgccaaccccaacgccaaccccaacgccaaccccaacgccaaccccaacgccaaccccaacgccaaccccaacgccaaccccaacgccaaccccaacgucgaccccaacgccaaccccaacgccaaccccaacgccaaccccaacgccaaccccaacgccaaccccaacgccaaccccaacgccaaccccaacgccaaccccaacgccaaccccaacgccaaccccaacgccaaccccaacgccaaccccaacgccaaccccaacgccaaccccaacgccaaccccaacgccaaccccaacgccaaccccaacgccaaccccaacaagaacaaccagggcaacggccagggccacaacaugcccaacgaccccaaccgcaacgucgacgagaacgccaacgccaacuccgccgucaagaacaacaacaacgaggagcccuccgacaagcacaucaaggaguaccucaacaagauccagaacucccucuccaccgaguggucccccugcuccgucaccugcggcaacggcauccagguccgcaucaagcccggcuccgccaacaagcccaaggacgagcucgacuacgccaacgacaucgagaagaagaucugcaagauggagaagugcuccuccgucuucaacgucgucaacuccuccaucggccucaucaugguccucuccuuccucuuccucaacugaggacuagucccuguucccagagcccacuuuuuuuucuuuuuuugaaauaaaauagccugucuuucagaucucaaaggcucuuuucagagccaccaaaaaaaaaaaaaaaaaaaaaaaaaaaaaaaaaaaaaaaaaaaaaaaaaaaaaaaaaaaaaaaaaaaaaaaaaaaaaaaaaaaaaaaaaaaaaaaaaaaaa

SEQ ID NO: 9805 - RNA, 1781 nt, Artificial Sequence
  mRNA Design a-1 (hSL-A100) comprising derived and/or modified sequence from Pf(3D7)__XP_001351122.1__HsALB_Pf-CSP(19-272)_L(PVTN)_HBsAg (opt2)
aggagagucccgcagucggcguccagcggcucugcuuguucgugugugugucguugcaggccuuauucaagcuuaccaugaagugggucaccuucaucucccuccucuuccucuucuccuccgccuacucccucuuccaggaguaccagugcuacggcuccuccuccaacacccgcguccucaacgagcucaacuacgacaacgccggcaccaaccucuacaacgagcucgagaugaacuacuacggcaagcaggagaacugguacucccucaagaagaacucccgcucccucggcgagaacgacgacggcaacaacgaggacaacgagaagcuccgcaagcccaagcacaagaagcucaagcagcccgccgacggcaaccccgaccccaacgccaaccccaacgucgaccccaacgccaaccccaacgucgaccccaacgccaaccccaacgucgaccccaacgccaaccccaacgccaaccccaacgccaaccccaacgccaaccccaacgccaaccccaacgccaaccccaacgccaaccccaacgccaaccccaacgccaaccccaacgccaaccccaacgccaaccccaacgccaaccccaacgccaaccccaacgccaaccccaacgccaaccccaacgccaaccccaacgccaaccccaacgucgaccccaacgccaaccccaacgccaaccccaacgccaaccccaacgccaaccccaacgccaaccccaacgccaaccccaacgccaaccccaacgccaaccccaacgccaaccccaacgccaaccccaacgccaaccccaacgccaaccccaacgccaaccccaacgccaaccccaacgccaaccccaacgccaaccccaacgccaaccccaacgccaacccccccgucaccaacauggagaacaucaccuccggcuuccucggcccccuccucguccuccaggccggcuucuuccuccucacccgcauccucaccaucccccagucccucgacuccugguggaccucccucaacuuccucggcggcucccccgucugccucggccagaacucccagucccccaccuccaaccacucccccaccuccugcccccccaucugccccggcuaccgcuggaugugccuccgccgcuucaucaucuuccucuucauccuccuccucugccucaucuuccuccucguccuccucgacuaccagggcaugcuccccgucugcccccucauccccggcuccaccaccaccaacaccggccccugcaagaccugcaccacccccgcccagggcaacuccauguuccccuccugcugcugcaccaagcccaccgacggcaacugcaccugcauccccauccccuccuccugggccuucgccaaguaccucugggagugggccuccguccgcuucuccuggcucucccuccucguccccuucguccagugguucgucggccucucccccaccgucuggcucuccgccaucuggaugaugugguacuggggccccucccucuacuccaucgucucccccuucaucccccuccuccccaucuucuucugccucugggucuacaucugaggacuagucccuguucccagagcccacuuuuuuuucuuuuuuugaaauaaaauagccugucuuucagaucucaaaggcucuuuucagagccaccaaaaaaaaaaaaaaaaaaaaaaaaaaaaaaaaaaaaaaaaaaaaaaaaaaaaaaaaaaaaaaaaaaaaaaaaaaaaaaaaaaaaaaaaaaaaaaaaaaaaa

SEQ ID NO: 9806 - RNA, 1898 nt, Artificial Sequence
  mRNA Design a-1 (hSL-A100) comprising derived and/or modified sequence from Pf(3D7)__XP_001351122.1__HsALB_Pf-CSP(19-272)_L(AAY)_Pf-CSP(346-3 65)_L(AAY)_PADRE_L(PVTN)_HBsAg (opt2)
aggagagucccgcagucggcguccagcggcucugcuuguucgugugugugucguugcaggccuuauucaagcuuaccaugaagugggucaccuucaucucccuccucuuccucuucuccuccgccuacucccucuuccaggaguaccagugcuacggcuccuccuccaacacccgcguccucaacgagcucaacuacgacaacgccggcaccaaccucuacaacgagcucgagaugaacuacuacggcaagcaggagaacugguacucccucaagaagaacucccgcucccucggcgagaacgacgacggcaacaacgaggacaacgagaagcuccgcaagcccaagcacaagaagcucaagcagcccgccgacggcaaccccgaccccaacgccaaccccaacgucgaccccaacgccaaccccaacgucgaccccaacgccaaccccaacgucgaccccaacgccaaccccaacgccaaccccaacgccaaccccaacgccaaccccaacgccaaccccaacgccaaccccaacgccaaccccaacgccaaccccaacgccaaccccaacgccaaccccaacgccaaccccaacgccaaccccaacgccaaccccaacgccaaccccaacgccaaccccaacgccaaccccaacgccaaccccaacgucgaccccaacgccaaccccaacgccaaccccaacgccaaccccaacgccaaccccaacgccaaccccaacgccaaccccaacgccaaccccaacgccaaccccaacgccaaccccaacgccaaccccaacgccaaccccaacgccaaccccaacgccaaccccaacgccaaccccaacgccaaccccaacgccaaccccaacgccaaccccaacgccaaccccgccgccuacaucaagcccggcuccgccaacaagcccaaggacgagcucgacuacgccaacgacaucgaggccgccuacgccaaguucgucgccgccuggacccucaaggccgccgcccccgucaccaacauggagaacaucaccuccggcuuccucggcccccuccucguccuccaggccggcuucuuccuccucacccgcauccucaccaucccccagucccucgacuccugguggaccucccucaacuuccucggcggcucccccgucugccucggccagaacucccagucccccaccuccaaccacucccccaccuccugcccccccaucugccccggcuaccgcuggaugugccuccgccgcuucaucaucuuccucuucauccuccuccucugccucaucuuccuccucguccuccucgacuaccagggcaugcuccccgucugcccccucauccccggcuccaccaccaccaacaccggccccugcaagaccugcaccacccccgcccagggcaacuccauguuccccuccugcugcugcaccaagcccaccgacggcaacugcaccugcauccccauccccuccuccugggccuucgccaaguaccucugggagugggccuccguccgcuucuccuggcucucccuccucguccccuucguccagugguucgucggccucucccccaccgucuggcucuccgccaucuggaugaugugguacuggggccccucccucuacuccaucgucucccccuucaucccccuccuccccaucuucuucugccucugggucuacaucugaggacuagucccuguucccagagcccacuuuuuuuucuuuuuuugaaauaaaauagccugucuuucagaucucaaaggcucuuuucagagccaccaaaaaaaaaaaaaaaaaaaaaaaaaaaaaaaaaaaaaaaaaaaaaaaaaaaaaaaaaaaaaaaaaaaaaaaaaaaaaaaaaaaaaaaaaaaaaaaaaaaaa

SEQ ID NO: 9807 - RNA, 2117 nt, Artificial Sequence
  mRNA Design a-1 (hSL-A100) comprising derived and/or modified sequence from Pf(3D7)__XP_001351122.1__HsALB_Pf-CSP(19-384)_L(PVTN)_HBsAg (opt2)
aggagagucccgcagucggcguccagcggcucugcuuguucgugugugugucguugcaggccuuauucaagcuuaccaugaagugggucaccuucaucucccuccucuuccucuucuccuccgccuacucccucuuccaggaguaccagugcuacggcuccuccuccaacacccgcguccucaacgagcucaacuacgacaacgccggcaccaaccucuacaacgagcucgagaugaacuacuacggcaagcaggagaacugguacucccucaagaagaacucccgcucccucggcgagaacgacgacggcaacaacgaggacaacgagaagcuccgcaagcccaagcacaagaagcucaagcagcccgccgacggcaaccccgaccccaacgccaaccccaacgucgaccccaacgccaaccccaacgucgaccccaacgccaaccccaacgucgaccccaacgccaaccccaacgccaaccccaacgccaaccccaacgccaaccccaacgccaaccccaacgccaaccccaacgccaaccccaacgccaaccccaacgccaaccccaacgccaaccccaacgccaaccccaacgccaaccccaacgccaaccccaacgccaaccccaacgccaaccccaacgccaaccccaacgccaaccccaacgucgaccccaacgccaaccccaacgccaaccccaacgccaaccccaacgccaaccccaacgccaaccccaacgccaaccccaacgccaaccccaacgccaaccccaacgccaaccccaacgccaaccccaacgccaaccccaacgccaaccccaacgccaaccccaacgccaaccccaacgccaaccccaacgccaaccccaacgccaaccccaacgccaaccccaacaagaacaaccagggcaacggccagggccacaacaugcccaacgaccccaaccgcaacgucgacgagaacgccaacgccaacuccgccgucaagaacaacaacaacgaggagcccuccgacaagcacaucaaggaguaccucaacaagauccagaacucccucuccaccgaguggucccccugcuccgucaccugcggcaacggcauccagguccgcaucaagcccggcuccgccaacaagcccaaggacgagcucgacuacgccaacgacaucgagaagaagaucugcaagauggagaagugcuccuccgucuucaacgucgucaacuccucccccgucaccaacauggagaacaucaccuccggcuuccucggcccccuccucguccuccaggccggcuucuuccuccucacccgcauccucaccaucccccagucccucgacuccugguggaccucccucaacuuccucggcggcucccccgucugccucggccagaacucccagucccccaccuccaaccacucccccaccuccugcccccccaucugccccggcuaccgcuggaugugccuccgccgcuucaucaucuuccucuucauccuccuccucugccucaucuuccuccucguccuccucgacuaccagggcaugcuccccgucugcccccucauccccggcuccaccaccaccaacaccggccccugcaagaccugcaccacccccgcccagggcaacuccauguuccccuccugcugcugcaccaagcccaccgacggcaacugcaccugcauccccauccccuccuccugggccuucgccaaguaccucugggagugggccuccguccgcuucuccuggcucucccuccucguccccuucguccagugguucgucggccucucccccaccgucuggcucuccgccaucuggaugaugugguacuggggccccucccucuacuccaucgucucccccuucaucccccuccuccccaucuucuucugccucugggucuacaucugaggacuagucccuguucccagagcccacuuuuuuuucuuuuuuugaaauaaaauagccugucuuucagaucucaaaggcucuuuucagagccaccaaaaaaaaaaaaaaaaaaaaaaaaaaaaaaaaaaaaaaaaaaaaaaaaaaaaaaaaaaaaaaaaaaaaaaaaaaaaaaaaaaaaaaaaaaaaaaaaaaaaa

SEQ ID NO: 9808 - RNA, 1934 nt, Artificial Sequence
  mRNA Design a-1 (hSL-A100) comprising derived and/or modified sequence from Pf(3D7)__XP_001351122.1__HsALB_Pf-CSP(19-384)_L(SGG)_Ferritin (opt2)
aggagagucccgcagucggcguccagcggcucugcuuguucgugugugugucguugcaggccuuauucaagcuuaccaugaagugggucaccuucaucucccuccucuuccucuucuccuccgccuacucccucuuccaggaguaccagugcuacggcuccuccuccaacacccgcguccucaacgagcucaacuacgacaacgccggcaccaaccucuacaacgagcucgagaugaacuacuacggcaagcaggagaacugguacucccucaagaagaacucccgcucccucggcgagaacgacgacggcaacaacgaggacaacgagaagcuccgcaagcccaagcacaagaagcucaagcagcccgccgacggcaaccccgaccccaacgccaaccccaacgucgaccccaacgccaaccccaacgucgaccccaacgccaaccccaacgucgaccccaacgccaaccccaacgccaaccccaacgccaaccccaacgccaaccccaacgccaaccccaacgccaaccccaacgccaaccccaacgccaaccccaacgccaaccccaacgccaaccccaacgccaaccccaacgccaaccccaacgccaaccccaacgccaaccccaacgccaaccccaacgccaaccccaacgccaaccccaacgucgaccccaacgccaaccccaacgccaaccccaacgccaaccccaacgccaaccccaacgccaaccccaacgccaaccccaacgccaaccccaacgccaaccccaacgccaaccccaacgccaaccccaacgccaaccccaacgccaaccccaacgccaaccccaacgccaaccccaacgccaaccccaacgccaaccccaacgccaaccccaacgccaaccccaacaagaacaaccagggcaacggccagggccacaacaugcccaacgaccccaaccgcaacgucgacgagaacgccaacgccaacuccgccgucaagaacaacaacaacgaggagcccuccgacaagcacaucaaggaguaccucaacaagauccagaacucccucuccaccgaguggucccccugcuccgucaccugcggcaacggcauccagguccgcaucaagcccggcuccgccaacaagcccaaggacgagcucgacuacgccaacgacaucgagaagaagaucugcaagauggagaagugcuccuccgucuucaacgucgucaacuccuccuccggcggccucuccaaggacaucaucaagcuccucaacgagcaggucaacaaggagaugaacuccuccaaccucuacauguccauguccuccuggugcuacacccacucccucgacggcgccggccucuuccucuucgaccacgccgccgaggaguacgagcacgccaagaagcucaucaucuuccucaacgagaacaacguccccguccagcucaccuccaucuccgcccccgagcacaaguucgagggccucacccagaucuuccagaaggccuacgagcacgagcagcacaucuccgaguccaucaacaacaucgucgaccacgccaucaaguccaaggaccacgccaccuucaacuuccuccagugguacgucgccgagcagcacgaggaggagguccucuucaaggacauccucgacaagaucgagcucaucggcaacgagaaccacggccucuaccucgccgaccaguacgucaagggcaucgccaagucccgcaaguccugaggacuagucccuguucccagagcccacuuuuuuuucuuuuuuugaaauaaaauagccugucuuucagaucucaaaggcucuuuucagagccaccaaaaaaaaaaaaaaaaaaaaaaaaaaaaaaaaaaaaaaaaaaaaaaaaaaaaaaaaaaaaaaaaaaaaaaaaaaaaaaaaaaaaaaaaaaaaaaaaaaaaa

SEQ ID NO: 9809 - RNA, 1895 nt, Artificial Sequence
  mRNA Design a-1 (hSL-A100) comprising derived and/or modified sequence from Pf(3D7)__XP_001351122.1__HsALB_Pf-CSP(93-384)_L(PVTN)_HBsAg (opt2)
aggagagucccgcagucggcguccagcggcucugcuuguucgugugugugucguugcaggccuuauucaagcuuaccaugaagugggucaccuucaucucccuccucuuccucuucuccuccgccuacuccaagcucaagcagcccgccgacggcaaccccgaccccaacgccaaccccaacgucgaccccaacgccaaccccaacgucgaccccaacgccaaccccaacgucgaccccaacgccaaccccaacgccaaccccaacgccaaccccaacgccaaccccaacgccaaccccaacgccaaccccaacgccaaccccaacgccaaccccaacgccaaccccaacgccaaccccaacgccaaccccaacgccaaccccaacgccaaccccaacgccaaccccaacgccaaccccaacgccaaccccaacgccaaccccaacgucgaccccaacgccaaccccaacgccaaccccaacgccaaccccaacgccaaccccaacgccaaccccaacgccaaccccaacgccaaccccaacgccaaccccaacgccaaccccaacgccaaccccaacgccaaccccaacgccaaccccaacgccaaccccaacgccaaccccaacgccaaccccaacgccaaccccaacgccaaccccaacgccaaccccaacaagaacaaccagggcaacggccagggccacaacaugcccaacgaccccaaccgcaacgucgacgagaacgccaacgccaacuccgccgucaagaacaacaacaacgaggagcccuccgacaagcacaucaaggaguaccucaacaagauccagaacucccucuccaccgaguggucccccugcuccgucaccugcggcaacggcauccagguccgcaucaagcccggcuccgccaacaagcccaaggacgagcucgacuacgccaacgacaucgagaagaagaucugcaagauggagaagugcuccuccgucuucaacgucgucaacuccucccccgucaccaacauggagaacaucaccuccggcuuccucggcccccuccucguccuccaggccggcuucuuccuccucacccgcauccucaccaucccccagucccucgacuccugguggaccucccucaacuuccucggcggcucccccgucugccucggccagaacucccagucccccaccuccaaccacucccccaccuccugcccccccaucugccccggcuaccgcuggaugugccuccgccgcuucaucaucuuccucuucauccuccuccucugccucaucuuccuccucguccuccucgacuaccagggcaugcuccccgucugcccccucauccccggcuccaccaccaccaacaccggccccugcaagaccugcaccacccccgcccagggcaacuccauguuccccuccugcugcugcaccaagcccaccgacggcaacugcaccugcauccccauccccuccuccugggccuucgccaaguaccucugggagugggccuccguccgcuucuccuggcucucccuccucguccccuucguccagugguucgucggccucucccccaccgucuggcucuccgccaucuggaugaugugguacuggggccccucccucuacuccaucgucucccccuucaucccccuccuccccaucuucuucugccucugggucuacaucugaggacuagucccuguucccagagcccacuuuuuuuucuuuuuuugaaauaaaauagccugucuuucagaucucaaaggcucuuuucagagccaccaaaaaaaaaaaaaaaaaaaaaaaaaaaaaaaaaaaaaaaaaaaaaaaaaaaaaaaaaaaaaaaaaaaaaaaaaaaaaaaaaaaaaaaaaaaaaaaaaaaaa

SEQ ID NO: 9810 - RNA, 1556 nt, Artificial Sequence; identical to SEQ ID NO: 8105
  mRNA Design a-1 (hSL-A100) comprising derived and/or modified sequence from Pf(3D7)__XP_001351122.1__HsALB_Pf-CSP(199-377)_L(PVTN)_HBsAg (opt2)

SEQ ID NO: 9811 - RNA, 1253 nt, Artificial Sequence
  mRNA Design a-1 (hSL-A100) comprising derived and/or modified sequence from Pf(3D7)__XP_001351122.1__HsALB_Pf-CSP(19-272)_L(AAY)_Pf-CSP(346-3 75)_L(AAY)_Pf-CSP(310-327) (opt2)
aggagagucccgcagucggcguccagcggcucugcuuguucgugugugugucguugcaggccuuauucaagcuuaccaugaagugggucaccuucaucucccuccucuuccucuucuccuccgccuacucccucuuccaggaguaccagugcuacggcuccuccuccaacacccgcguccucaacgagcucaacuacgacaacgccggcaccaaccucuacaacgagcucgagaugaacuacuacggcaagcaggagaacugguacucccucaagaagaacucccgcucccucggcgagaacgacgacggcaacaacgaggacaacgagaagcuccgcaagcccaagcacaagaagcucaagcagcccgccgacggcaaccccgaccccaacgccaaccccaacgucgaccccaacgccaaccccaacgucgaccccaacgccaaccccaacgucgaccccaacgccaaccccaacgccaaccccaacgccaaccccaacgccaaccccaacgccaaccccaacgccaaccccaacgccaaccccaacgccaaccccaacgccaaccccaacgccaaccccaacgccaaccccaacgccaaccccaacgccaaccccaacgccaaccccaacgccaaccccaacgccaaccccaacgccaaccccaacgucgaccccaacgccaaccccaacgccaaccccaacgccaaccccaacgccaaccccaacgccaaccccaacgccaaccccaacgccaaccccaacgccaaccccaacgccaaccccaacgccaaccccaacgccaaccccaacgccaaccccaacgccaaccccaacgccaaccccaacgccaaccccaacgccaaccccaacgccaaccccaacgccaaccccgccgccuacaucaagcccggcuccgccaacaagcccaaggacgagcucgacuacgccaacgacaucgagaagaagaucugcaagauggagaagugcuccgccgccuacgagcccuccgacaagcacaucaaggaguaccucaacaagauccagaacucccucugaggacuagucccuguucccagagcccacuuuuuuuucuuuuuuugaaauaaaauagccugucuuucagaucucaaaggcucuuuucagagccaccaaaaaaaaaaaaaaaaaaaaaaaaaaaaaaaaaaaaaaaaaaaaaaaaaaaaaaaaaaaaaaaaaaaaaaaaaaaaaaaaaaaaaaaaaaaaaaaaaaaaa

SEQ ID NO: 9812 - RNA, 1301 nt, Artificial Sequence
  mRNA Design a-1 (hSL-A100) comprising derived and/or modified sequence from Pf(3D7)__XP_001351122.1__HsALB_Pf-CSP(19-272)_L(AAY)_Pf-CSP(346-3 75)_L(AAY)_Pf-CSP(310-327)_L(AAY)_PADRE (opt2)
aggagagucccgcagucggcguccagcggcucugcuuguucgugugugugucguugcaggccuuauucaagcuuaccaugaagugggucaccuucaucucccuccucuuccucuucuccuccgccuacucccucuuccaggaguaccagugcuacggcuccuccuccaacacccgcguccucaacgagcucaacuacgacaacgccggcaccaaccucuacaacgagcucgagaugaacuacuacggcaagcaggagaacugguacucccucaagaagaacucccgcucccucggcgagaacgacgacggcaacaacgaggacaacgagaagcuccgcaagcccaagcacaagaagcucaagcagcccgccgacggcaaccccgaccccaacgccaaccccaacgucgaccccaacgccaaccccaacgucgaccccaacgccaaccccaacgucgaccccaacgccaaccccaacgccaaccccaacgccaaccccaacgccaaccccaacgccaaccccaacgccaaccccaacgccaaccccaacgccaaccccaacgccaaccccaacgccaaccccaacgccaaccccaacgccaaccccaacgccaaccccaacgccaaccccaacgccaaccccaacgccaaccccaacgccaaccccaacgucgaccccaacgccaaccccaacgccaaccccaacgccaaccccaacgccaaccccaacgccaaccccaacgccaaccccaacgccaaccccaacgccaaccccaacgccaaccccaacgccaaccccaacgccaaccccaacgccaaccccaacgccaaccccaacgccaaccccaacgccaaccccaacgccaaccccaacgccaaccccaacgccaaccccgccgccuacaucaagcccggcuccgccaacaagcccaaggacgagcucgacuacgccaacgacaucgagaagaagaucugcaagauggagaagugcuccgccgccuacgagcccuccgacaagcacaucaaggaguaccucaacaagauccagaacucccucgccgccuacgccaaguucgucgccgccuggacccucaaggccgccgccugaggacuagucccuguucccagagcccacuuuuuuuucuuuuuuugaaauaaaauagccugucuuucagaucucaaaggcucuuuucagagccaccaaaaaaaaaaaaaaaaaaaaaaaaaaaaaaaaaaaaaaaaaaaaaaaaaaaaaaaaaaaaaaaaaaaaaaaaaaaaaaaaaaaaaaaaaaaaaaaaaaaaa

SEQ ID NO: 9813 - RNA, 1301 nt, Artificial Sequence
  mRNA Design a-1 (hSL-A100) comprising derived and/or modified sequence from Pf(3D7)__XP_001351122.1__HsALB_Pf-CSP(19-272)_L(AAY)_Pf-CSP(310-3 27)_L(AAY)_Pf-CSP(346-375)_L(AAY)_PADRE (opt2)
aggagagucccgcagucggcguccagcggcucugcuuguucgugugugugucguugcaggccuuauucaagcuuaccaugaagugggucaccuucaucucccuccucuuccucuucuccuccgccuacucccucuuccaggaguaccagugcuacggcuccuccuccaacacccgcguccucaacgagcucaacuacgacaacgccggcaccaaccucuacaacgagcucgagaugaacuacuacggcaagcaggagaacugguacucccucaagaagaacucccgcucccucggcgagaacgacgacggcaacaacgaggacaacgagaagcuccgcaagcccaagcacaagaagcucaagcagcccgccgacggcaaccccgaccccaacgccaaccccaacgucgaccccaacgccaaccccaacgucgaccccaacgccaaccccaacgucgaccccaacgccaaccccaacgccaaccccaacgccaaccccaacgccaaccccaacgccaaccccaacgccaaccccaacgccaaccccaacgccaaccccaacgccaaccccaacgccaaccccaacgccaaccccaacgccaaccccaacgccaaccccaacgccaaccccaacgccaaccccaacgccaaccccaacgccaaccccaacgucgaccccaacgccaaccccaacgccaaccccaacgccaaccccaacgccaaccccaacgccaaccccaacgccaaccccaacgccaaccccaacgccaaccccaacgccaaccccaacgccaaccccaacgccaaccccaacgccaaccccaacgccaaccccaacgccaaccccaacgccaaccccaacgccaaccccaacgccaaccccaacgccaaccccgccgccuacgagcccuccgacaagcacaucaaggaguaccucaacaagauccagaacucccucgccgccuacaucaagcccggcuccgccaacaagcccaaggacgagcucgacuacgccaacgacaucgagaagaagaucugcaagauggagaagugcuccgccgccuacgccaaguucgucgccgccuggacccucaaggccgccgccugaggacuagucccuguucccagagcccacuuuuuuuucuuuuuuugaaauaaaauagccugucuuucagaucucaaaggcucuuuucagagccaccaaaaaaaaaaaaaaaaaaaaaaaaaaaaaaaaaaaaaaaaaaaaaaaaaaaaaaaaaaaaaaaaaaaaaaaaaaaaaaaaaaaaaaaaaaaaaaaaaaaaa

SEQ ID NO: 9814 - RNA, 1355 nt, Artificial Sequence
  mRNA Design a-1 (hSL-A100) comprising derived and/or modified sequence from Pf(3D7)__XP_001351122.1__HsALB_Pf-CSP(19-272)_L(AAY)_Pf-CSP(310-3 27)_L(AAY)_Pf-CSP(346-375)_L(AAY)_PADRE_L(AAY)_P2 (opt2)
aggagagucccgcagucggcguccagcggcucugcuuguucgugugugugucguugcaggccuuauucaagcuuaccaugaagugggucaccuucaucucccuccucuuccucuucuccuccgccuacucccucuuccaggaguaccagugcuacggcuccuccuccaacacccgcguccucaacgagcucaacuacgacaacgccggcaccaaccucuacaacgagcucgagaugaacuacuacggcaagcaggagaacugguacucccucaagaagaacucccgcucccucggcgagaacgacgacggcaacaacgaggacaacgagaagcuccgcaagcccaagcacaagaagcucaagcagcccgccgacggcaaccccgaccccaacgccaaccccaacgucgaccccaacgccaaccccaacgucgaccccaacgccaaccccaacgucgaccccaacgccaaccccaacgccaaccccaacgccaaccccaacgccaaccccaacgccaaccccaacgccaaccccaacgccaaccccaacgccaaccccaacgccaaccccaacgccaaccccaacgccaaccccaacgccaaccccaacgccaaccccaacgccaaccccaacgccaaccccaacgccaaccccaacgccaaccccaacgucgaccccaacgccaaccccaacgccaaccccaacgccaaccccaacgccaaccccaacgccaaccccaacgccaaccccaacgccaaccccaacgccaaccccaacgccaaccccaacgccaaccccaacgccaaccccaacgccaaccccaacgccaaccccaacgccaaccccaacgccaaccccaacgccaaccccaacgccaaccccaacgccaaccccgccgccuacgagcccuccgacaagcacaucaaggaguaccucaacaagauccagaacucccucgccgccuacaucaagcccggcuccgccaacaagcccaaggacgagcucgacuacgccaacgacaucgagaagaagaucugcaagauggagaagugcuccgccgccuacgccaaguucgucgccgccuggacccucaaggccgccgccgccgccuaccaguacaucaaggccaacuccaaguucaucggcaucaccgagcucugaggacuagucccuguucccagagcccacuuuuuuuucuuuuuuugaaauaaaauagccugucuuucagaucucaaaggcucuuuucagagccaccaaaaaaaaaaaaaaaaaaaaaaaaaaaaaaaaaaaaaaaaaaaaaaaaaaaaaaaaaaaaaaaaaaaaaaaaaaaaaaaaaaaaaaaaaaaaaaaaaaaaa

SEQ ID NO: 9815 - RNA, 1319 nt, Artificial Sequence
  mRNA Design a-1 (hSL-A100) comprising derived and/or modified sequence from Pf(3D7)__XP_001351122.1__HsALB_Pf-CSP(19-272)_L(AAY)_Pf-CSP(310-3 27)_Linker (AAY)_Pf-CSP(346-397) (opt2)
aggagagucccgcagucggcguccagcggcucugcuuguucgugugugugucguugcaggccuuauucaagcuuaccaugaagugggucaccuucaucucccuccucuuccucuucuccuccgccuacucccucuuccaggaguaccagugcuacggcuccuccuccaacacccgcguccucaacgagcucaacuacgacaacgccggcaccaaccucuacaacgagcucgagaugaacuacuacggcaagcaggagaacugguacucccucaagaagaacucccgcucccucggcgagaacgacgacggcaacaacgaggacaacgagaagcuccgcaagcccaagcacaagaagcucaagcagcccgccgacggcaaccccgaccccaacgccaaccccaacgucgaccccaacgccaaccccaacgucgaccccaacgccaaccccaacgucgaccccaacgccaaccccaacgccaaccccaacgccaaccccaacgccaaccccaacgccaaccccaacgccaaccccaacgccaaccccaacgccaaccccaacgccaaccccaacgccaaccccaacgccaaccccaacgccaaccccaacgccaaccccaacgccaaccccaacgccaaccccaacgccaaccccaacgccaaccccaacgucgaccccaacgccaaccccaacgccaaccccaacgccaaccccaacgccaaccccaacgccaaccccaacgccaaccccaacgccaaccccaacgccaaccccaacgccaaccccaacgccaaccccaacgccaaccccaacgccaaccccaacgccaaccccaacgccaaccccaacgccaaccccaacgccaaccccaacgccaaccccaacgccaaccccgccgccuacgagcccuccgacaagcacaucaaggaguaccucaacaagauccagaacucccucgccgccuacaucaagcccggcuccgccaacaagcccaaggacgagcucgacuacgccaacgacaucgagaagaagaucugcaagauggagaagugcuccuccgucuucaacgucgucaacuccuccaucggccucaucaugguccucuccuuccucuuccucaacugaggacuagucccuguucccagagcccacuuuuuuuucuuuuuuugaaauaaaauagccugucuuucagaucucaaaggcucuuuucagagccaccaaaaaaaaaaaaaaaaaaaaaaaaaaaaaaaaaaaaaaaaaaaaaaaaaaaaaaaaaaaaaaaaaaaaaaaaaaaaaaaaaaaaaaaaaaaaaaaaaaaaa

SEQ ID NO: 9816 - RNA, 1919 nt, Artificial Sequence
  mRNA Design a-1 (hSL-A100) comprising derived and/or modified sequence from Pf(3D7)__XP_001351122.1__LumSynt_L(GGS4-GGG)_Pf-CSP(19-397) (opt3)
aggagagucccgcagucggcguccagcggcucugcuuguucgugugugugucguugcaggccuuauucaagcuuaccaugcagaucuacgagggcaagcugaccgccgaagggcucagauucggaauuguggcuagcagguuuaaccacgcacuugucgaccggcugguugagggugccauagaugcgaucgugcgccauggcgggcgagaagaggacauuacauugguacgugugcccggauccugggaaaucccugucgcugccggcgaguuagcaagaaaagaggauauugacgccgugaucgcuauagguguucugaucaggggagcaacuccacacuucgauuauauugccucugaagugucaaaggggcuagcugaccucagucuggagcuucggaaaccgaucacguuuggcgucauuaccgccgauacacuggaacaagcgaucgagcgcgcaggcacuaagcaugggaauaaaggaugggaggccgcuuugagcgccauagaaauggcaaaccucuucaagucccugagagguggcucugggggaucgggcgguucagggggaagcggcggcgggcuguuucaggaguaccagugcuauggaaguuccucuaauaccagggugcucaacgaauuaaauuacgacaacgcugguacaaaucuguauaacgagcuugaaaugaauuacuauggcaagcaggagaacugguacagcuugaaaaagaacucccggucacugggggagaaugaugacggaaauaacgaagauaaugagaaacuacgcaagcccaaacacaagaagcucaaacaaccugccgacggcaacccagaucccaacgcgaauccuaacguagacccaaaugccaaccccaauguugacccuaacgcaaauccaaacguggauccgaaugcuaaccccaaugccaacccuaaugcuaacccaaaugccaaccccaacgcaaauccuaacgccaauccaaacgcuaaucccaacgcgaauccgaacgcaaauccuaacgccaaucccaacgcuaauccaaacgccaauccuaacgcaaaccccaaugccaacccaaaugcuaaccccaaugccaacccuaaugcaaacccaaaugucgacccgaacgcgaaucccaacgcuaauccuaacgccaauccaaacgcaaaccccaaugccaacccuaaugcuaacccaaaugccaaccccaaugcaaacccgaaugcuaacccuaaugccaacccaaaugcgaaccccaaugccaacccuaaugcuaaccccaacgcaaauccaaacgccaauccuaacgcuaaucccaacgccaauccaaacgcaaauccgaacaagaauaaccaggguaaugggcagggccauaacaugccuaaugaucccaaccgaaacguggacgaaaaugcgaacgccaauagugcugugaaaaacaauaacaaugaggaaccaagcgauaagcacauuaaagaguaccugaacaagauccaaaauucucuuuccaccgaguggucacccugcagcgucacuugcggaaacggcauucagguuagaaucaaaccugggagugccaauaagccaaaggacgaacuggauuaugcaaacgacaucgagaaaaagauuuguaaaauggaaaaguguucuuccguguucaauguagugaacagcucgauaggauugaucaugguccucucuuuucuguucuuaaauugaggacuagucccuguucccagagcccacuuuuuuuucuuuuuuugaaauaaaauagccugucuuucagaucucaaaggcucuuuucagagccaccaaaaaaaaaaaaaaaaaaaaaaaaaaaaaaaaaaaaaaaaaaaaaaaaaaaaaaaaaaaaaaaaaaaaaaaaaaaaaaaaaaaaaaaaaaaaaaaaaaaaa

SEQ ID NO: 9817 - RNA, 1781 nt, Artificial Sequence
  mRNA Design a-1 (hSL-A100) comprising derived and/or modified sequence from Pf(3D7)__XP_001351122.1__HsALB_Pf-CSP(19-272)_L(PVTN)_HBsAg (opt3)
aggagagucccgcagucggcguccagcggcucugcuuguucgugugugugucguugcaggccuuauucaagcuuaccaugaagugggugaccuucaucagccugcucuuucuuuucuccucugccuacucacuguuucaggaguaucaaugcuacggcaguagcuccaacacaagagucuugaaugaauuaaacuaugacaaugcugggacuaaccuguacaaugagcuagaaaugaacuauuacggaaaacaggagaauugguauucucucaagaaaaacucgaggucacugggugaaaaugaugacggcaacaaugaggauaacgagaaacuucggaagcccaagcacaagaaacugaagcagccugcagacgggaauccagauccgaacgccaaucccaacguugacccuaacgcgaauccaaacguggaucccaaugcuaacccuaauguagacccaaacgccaaucccaacgcaaauccuaacgccaauccaaacgcuaauccgaacgcaaaucccaacgccaacccuaaugcuaacccaaaugccaaccccaaugcgaacccuaaugcaaacccaaaugccaaccccaaugcuaacccgaaugccaacccuaaugcaaaccccaacgcuaauccaaacgccaauccuaacgcgaaucccaacguggauccaaaugccaaccccaaugcaaacccuaaugcuaacccaaaugccaacccgaaugcuaaccccaacgccaauccuaacgcaaauccaaacgccaaucccaacgcuaauccuaacgcgaauccaaacgcaaaucccaacgccaauccgaacgcuaauccuaacgccaauccaaacgcaaaccccaaugccaacccuaaugcuaaccccaaugccaacccaccugucacgaauauggaaaacauuaccagcggauucuugggcccccuccuggugcugcaggcaggguuuuuccucuuaacacgcauacugacuaucccacaaagucuugacuccugguggaccucuuugaauuuucuggguggaagcccgguuugucuaggccagaacucccagucaccuacaaguaaucauagccccaccucuugcccacccauuuguccuggcuaccgauggaugugccuccguagauucaucauuuuucuguucauccuucuguugugucucauauuucuguuagugcugcucgauuaccaggggaugcuuccagucugcccccugaucccuggauccacuacaaccaacacggguccguguaaaacuugcaccacaccagcgcaaggcaauucaauguuccccagcuguugcuguacuaagccuaccgacgggaacugcacaugcauuccaauccccaguucuugggcuuuugccaaauauuugugggagugggcauccgugagguucagcuggcuaucgcugcucguaccuuucguucagugguuugugggacugucuccgaccgucuggcuuuccgccauuuggaugaugugguacuggggccccucacuguauaguaucgugagcccauucauaccuuugcuccccaucuuuuucugucuguggguguacauuugaggacuagucccuguucccagagcccacuuuuuuuucuuuuuuugaaauaaaauagccugucuuucagaucucaaaggcucuuuucagagccaccaaaaaaaaaaaaaaaaaaaaaaaaaaaaaaaaaaaaaaaaaaaaaaaaaaaaaaaaaaaaaaaaaaaaaaaaaaaaaaaaaaaaaaaaaaaaaaaaaaaaa

SEQ ID NO: 9818 - RNA, 1898 nt, Artificial Sequence
  mRNA Design a-1 (hSL-A100) comprising derived and/or modified sequence from Pf(3D7)__XP_001351122.1__HsALB_Pf-CSP(19-272)_L(AAY)_Pf-CSP(346-3 65)_L(AAY)_PADRE_L(PVTN)_HBsAg (opt3)
aggagagucccgcagucggcguccagcggcucugcuuguucgugugugugucguugcaggccuuauucaagcuuaccaugaagugggugaccuucaucagccugcucuuucuuuucuccucugccuacucacuguuucaggaguaucaaugcuacggcaguagcuccaacacaagagucuugaaugaauuaaacuaugacaaugcugggacuaaccuguacaaugagcuagaaaugaacuauuacggaaaacaggagaauugguauucucucaagaaaaacucgaggucacugggugaaaaugaugacggcaacaaugaggauaacgagaaacuucggaagcccaagcacaagaaacugaagcagccugcagacgggaauccagauccgaacgccaaucccaacguugacccuaacgcgaauccaaacguggaucccaaugcuaacccuaauguagacccaaacgccaaucccaacgcaaauccuaacgccaauccaaacgcuaauccgaacgcaaaucccaacgccaacccuaaugcuaacccaaaugccaaccccaaugcgaacccuaaugcaaacccaaaugccaaccccaaugcuaacccgaaugccaacccuaaugcaaaccccaacgcuaauccaaacgccaauccuaacgcgaaucccaacguggauccaaaugccaaccccaaugcaaacccuaaugcuaacccaaaugccaacccgaaugcuaaccccaacgccaauccuaacgcaaauccaaacgccaaucccaacgcuaauccuaacgcgaauccaaacgcaaaucccaacgccaauccgaacgcuaauccuaacgccaauccaaacgcaaaccccaaugccaacccuaaugcuaaccccaaugccaacccagcagcguacauuaaaccuggaagcgcuaauaagcccaaagacgaauuggauuacgccaacgacauagaggcagccuaugcuaaguucgucgccgcauggacgcucaaggcugccgcgccagugaccaauauggaaaacaucacaaguggcuuucuggguccgcugcucguuuuacaggccggguucuuucugcuuacucgcauuuugaccaucccucaaucccuggauucuugguggacaagccuaaauuuccucggaggcucccccgugugucugggccagaacucacagaguccaaccagcaaucauucucccacuuccugcccuccaauuugucccggguaccgauggaugugccuucguagauuuaucauauuccuguuuaucuugcuccuguguuuaauuuuccugcucguccuucuggacuaucagggaauguugccugugugcccgcuaaucccagguucaacaaccacgaacacuggccccuguaaaaccugcacaacuccugcucaagggaauagcauguuuccaaguuguugcuguaccaagcccacagacggaaacuguaccugcauuccuaucccgucuuccugggcauucgccaaauaccugugggagugggcuagcguaagguucucguggcucucucugcuuguucccuuugugcagugguucgucggccuguccccaacggugugguugucagccauauggaugaugugguauugggguccuagucucuacagcauugugucccccuuuaucccacuguuaccuauuuucuuuugccugugggucuauaucugaggacuagucccuguucccagagcccacuuuuuuuucuuuuuuugaaauaaaauagccugucuuucagaucucaaaggcucuuuucagagccaccaaaaaaaaaaaaaaaaaaaaaaaaaaaaaaaaaaaaaaaaaaaaaaaaaaaaaaaaaaaaaaaaaaaaaaaaaaaaaaaaaaaaaaaaaaaaaaaaaaaaa

SEQ ID NO: 9819 - RNA, 2117 nt, Artificial Sequence
  mRNA Design a-1 (hSL-A100) comprising derived and/or modified sequence from Pf(3D7)__XP_001351122.1__HsALB_Pf-CSP(19-384)_L(PVTN)_HBsAg (opt3)
aggagagucccgcagucggcguccagcggcucugcuuguucgugugugugucguugcaggccuuauucaagcuuaccaugaagugggugaccuucaucagccugcucuuucuuuucuccucugccuacucacuguuucaggaguaucaaugcuacggcaguagcuccaacacaagagucuugaaugaauuaaacuaugacaaugcugggacuaaccuguacaaugagcuagaaaugaacuauuacggaaaacaggagaauugguauucucucaagaaaaacucgaggucacugggugaaaaugaugacggcaacaaugaggauaacgagaaacuucggaagcccaagcacaagaaacugaagcagccugcagacgggaauccagauccgaacgccaaucccaacguugacccuaacgcgaauccaaacguggaucccaaugcuaacccuaauguagacccaaacgccaaucccaacgcaaauccuaacgccaauccaaacgcuaauccgaacgcaaaucccaacgccaacccuaaugcuaacccaaaugccaaccccaaugcgaacccuaaugcaaacccaaaugccaaccccaaugcuaacccgaaugccaacccuaaugcaaaccccaacgcuaauccaaacgccaauccuaacgcgaaucccaacguggauccaaaugccaaccccaaugcaaacccuaaugcuaacccaaaugccaacccgaaugcuaaccccaacgccaauccuaacgcaaauccaaacgccaaucccaacgcuaauccuaacgcgaauccaaacgcaaaucccaacgccaauccgaacgcuaauccuaacgccaauccaaacgcaaaccccaaugccaacccuaaugcuaaccccaaugccaacccaaauaaaaacaaucagggaaacggccaaggucauaauaugccuaacgaccccaaucgcaacgucgaugaaaaugcaaacgcgaacagcgcugugaagaauaacaauaacgaggaaccaagugacaaacacauuaaggaguacuugaauaagauacagaacucccucucuacggaguggagcccguguuccguuaccugcgggaauggaauccaggugcgaauuaaaccuggcucagccaacaagcccaaagaugaacuggacuacgcaaaugacaucgagaagaaaauuuguaagauggaaaaaugcaguagcgucuucaacgugguaaauucuuccccaguuacaaacauggagaauaucacuucaggcuuucuggggccccucuuagugcugcaggccggauucuuucuuuugacccguauacugacaaucccucaaagccuagauaguugguggaccucucucaacuuccuggguggcuccccagucugucuugggcagaauagccagucgcccacuucuaaccauuccccuacaucaugcccgccaauuugucccggauauagauggaugugccugaggcgguuuaucauuuucuuguuuauccuccuguuaugucugauauuccuccuugugcuguuggacuaccagggcaugcuaccugugugcccacugauucccgguaguaccacgacuaacaccgggccuuguaagacaugcacuaccccggcucaaggaaauagcauguuucccuccugcuguugcacaaagccaaccgauggcaacuguacgugcaucccuauucccucuagcugggccuucgcaaaauaucucugggaaugggcuucaguccgcuucaguuggcugucccuucugguuccauuugugcagugguucguaggcuugagcccuacuguguggcucucugccaucuggaugaugugguacugggggcccucacuguauaguaucgucagcccauuuauuccguuacugccuauauucuuuugucuauggguguacaucugaggacuagucccuguucccagagcccacuuuuuuuucuuuuuuugaaauaaaauagccugucuuucagaucucaaaggcucuuuucagagccaccaaaaaaaaaaaaaaaaaaaaaaaaaaaaaaaaaaaaaaaaaaaaaaaaaaaaaaaaaaaaaaaaaaaaaaaaaaaaaaaaaaaaaaaaaaaaaaaaaaaaa

SEQ ID NO: 9820 - RNA, 1934 nt, Artificial Sequence
  mRNA Design a-1 (hSL-A100) comprising derived and/or modified sequence from Pf(3D7)__XP_001351122.1__HsALB_Pf-CSP(19-384)_L(SGG)_Ferritin (opt3)
aggagagucccgcagucggcguccagcggcucugcuuguucgugugugugucguugcaggccuuauucaagcuuaccaugaagugggugaccuucaucagccugcucuuucuuuucuccucugccuacucacuguuucaggaguaucaaugcuacggcaguagcuccaacacaagagucuugaaugaauuaaacuaugacaaugcugggacuaaccuguacaaugagcuagaaaugaacuauuacggaaaacaggagaauugguauucucucaagaaaaacucgaggucacugggugaaaaugaugacggcaacaaugaggauaacgagaaacuucggaagcccaagcacaagaaacugaagcagccugcagacgggaauccagauccgaacgccaaucccaacguugacccuaacgcgaauccaaacguggaucccaaugcuaacccuaauguagacccaaacgccaaucccaacgcaaauccuaacgccaauccaaacgcuaauccgaacgcaaaucccaacgccaacccuaaugcuaacccaaaugccaaccccaaugcgaacccuaaugcaaacccaaaugccaaccccaaugcuaacccgaaugccaacccuaaugcaaaccccaacgcuaauccaaacgccaauccuaacgcgaaucccaacguggauccaaaugccaaccccaaugcaaacccuaaugcuaacccaaaugccaacccgaaugcuaaccccaacgccaauccuaacgcaaauccaaacgccaaucccaacgcuaauccuaacgcgaauccaaacgcaaaucccaacgccaauccgaacgcuaauccuaacgccaauccaaacgcaaaccccaaugccaacccuaaugcuaaccccaaugccaacccaaauaaaaacaaucagggaaacggccaaggucauaauaugccuaacgaccccaaucgcaacgucgaugaaaaugcaaacgcgaacagcgcugugaagaauaacaauaacgaggaaccaagugacaaacacauuaaggaguacuugaauaagauacagaacucccucucuacggaguggagcccguguuccguuaccugcgggaauggaauccaggugcgaauuaaaccuggcucagccaacaagcccaaagaugaacuggacuacgcaaaugacaucgagaagaaaauuuguaagauggaaaaaugcaguagcgucuucaacgugguaaauucuuccucaggcgggcugagcaaggauaucauaaagcucuuaaacgagcagguuaauaaagaaaugaacaguucuaaucuguauauguccaugagcucgugguguuacacacauucucuugacggagccgguuuguuucuguucgaucacgcugccgaggaguaugaacaugcaaagaaacuaaucauuuuucucaacgagaacaaugugccaguccaacugacuuccaucucagcucccgaacacaaguucgagggccuuacccagauuuuucagaaagccuacgaacacgagcagcauaucagugagagcauaaacaauauuguggaccacgcgaucaaguccaaggaucaugccacauucaacuuucugcaaugguauguggcugaacagcacgaggaagaggucuuguucaaagacauucucgauaagaucgaacugaucgggaaugagaaccacggauuauaccuggcagaccaguauguuaaaggcauugccaagucucguaaaagcugaggacuagucccuguucccagagcccacuuuuuuuucuuuuuuugaaauaaaauagccugucuuucagaucucaaaggcucuuuucagagccaccaaaaaaaaaaaaaaaaaaaaaaaaaaaaaaaaaaaaaaaaaaaaaaaaaaaaaaaaaaaaaaaaaaaaaaaaaaaaaaaaaaaaaaaaaaaaaaaaaaaaa

SEQ ID NO: 9821 - RNA, 1895 nt, Artificial Sequence
  mRNA Design a-1 (hSL-A100) comprising derived and/or modified sequence from Pf(3D7)__XP_001351122.1__HsALB_Pf-CSP(93-384)_L(PVTN)_HBsAg (opt3)
aggagagucccgcagucggcguccagcggcucugcuuguucgugugugugucguugcaggccuuauucaagcuuaccaugaagugggugaccuucaucagccugcucuuucuuuucuccucugccuacucaaaacugaagcagcccgcugacggcaacccugauccaaaugcaaacccgaaugucgaccccaacgccaauccuaacguugauccaaaugcgaaccccaauguggacccuaacgcuaauccaaacgccaaucccaacgcaaauccuaacgccaacccaaaugcuaacccgaaugcaaaccccaaugccaacccuaaugcuaacccaaaugccaaccccaaugcgaacccuaaugcaaacccaaaugccaaccccaacgcuaauccgaacgccaauccuaacgcaaaucccaacgcuaauccaaacgccaauccuaacguagaucccaaugcgaacccaaaugccaaccccaaugcaaacccuaacgcuaauccaaacgccaauccgaacgcuaaucccaacgccaauccuaacgcaaauccaaacgccaaucccaacgcuaauccuaacgcgaauccaaacgcaaaccccaaugccaacccgaaugcuaacccuaaugccaacccaaaugcaaaccccaaugccaacccuaaugcuaaccccaauaaaaacaaucaagggaacggacagggucacaauaugccaaacgacccuaacagaaauguggaugagaacgccaaugcaaacagugcggucaagaauaacaauaacgaggaacccagcgacaaacauauuaaggaauauuugaauaagauacagaacuccuuaucuacagaguggucgccaugcucagugacuuguggcaaugggauccagguuaggauuaaaccgggaagcgcuaacaagccuaaagaugaacuggacuacgccaaugauaucgagaagaaaauuugcaagauggagaaguguaguuccguguuuaacgucguaaauucuagccccgugacgaacauggaaaacaucaccuccggcuuccuagguccacuccugguucuucaagcaggguuuuuccuguugacacggauacucacuaucccccagucacuggacaguugguggaccagccugaauuuucucggaggcucuccugugugcuuaggccagaacucccagucaccaacaagcaaucacagucccaccucuuguccuccgauuugcccaggguaucgcuggaugugucugcgacguuucaucauuuuucuuuucaucuugcugcuaugccucauauuucugcuuguccuguuggauuaccaaggaaugcuccccguguguccucugauuccagguuccacuacaaccaacacgggccccugcaaaacuuguaccacuccugcccaggggaauagcauguucccgucgugcugcuguacaaagcccaccgacggaaacugcacauguaucccaauuccuucuuccugggcuuuugccaaauauuuaugggagugggcaucagugagauucaguuggcugagccuccuuguccccuucguucagugguuugugggccuguccccaaccguaugguugucugcuaucuggaugaugugguacugggguccuagccuauauucaaucgugagucccuucauuccacugcucccgauauuuuucugccugugggucuacaucugaggacuagucccuguucccagagcccacuuuuuuuucuuuuuuugaaauaaaauagccugucuuucagaucucaaaggcucuuuucagagccaccaaaaaaaaaaaaaaaaaaaaaaaaaaaaaaaaaaaaaaaaaaaaaaaaaaaaaaaaaaaaaaaaaaaaaaaaaaaaaaaaaaaaaaaaaaaaaaaaaaaaa

SEQ ID NO: 9822 - RNA, 1556 nt, Artificial Sequence; identical to SEQ ID NO: 8135
  mRNA Design a-1 (hSL-A100) comprising derived and/or modified sequence from Pf(3D7)__XP_001351122.1__HsALB_Pf-CSP(199-377)_L(PVTN)_HBsAg (opt3)

SEQ ID NO: 9823 - RNA, 1253 nt, Artificial Sequence
  mRNA Design a-1 (hSL-A100) comprising derived and/or modified sequence from Pf(3D7)__XP_001351122.1__HsALB_Pf-CSP(19-272)_L(AAY)_Pf-CSP(346-3 75)_L(AAY)_Pf-CSP(310-327) (opt3)
aggagagucccgcagucggcguccagcggcucugcuuguucgugugugugucguugcaggccuuauucaagcuuaccaugaagugggugaccuucaucagccugcucuuucuuuucuccucugccuacucacuguuucaggaguaucaaugcuacggcaguagcuccaacacaagagucuugaaugaauuaaacuaugacaaugcugggacuaaccuguacaaugagcuagaaaugaacuauuacggaaaacaggagaauugguauucucucaagaaaaacucgaggucacugggugaaaaugaugacggcaacaaugaggauaacgagaaacuucggaagcccaagcacaagaaacugaagcagccugcagacgggaauccagauccgaacgccaaucccaacguugacccuaacgcgaauccaaacguggaucccaaugcuaacccuaauguagacccaaacgccaaucccaacgcaaauccuaacgccaauccaaacgcuaauccgaacgcaaaucccaacgccaacccuaaugcuaacccaaaugccaaccccaaugcgaacccuaaugcaaacccaaaugccaaccccaaugcuaacccgaaugccaacccuaaugcaaaccccaacgcuaauccaaacgccaauccuaacgcgaaucccaacguggauccaaaugccaaccccaaugcaaacccuaaugcuaacccaaaugccaacccgaaugcuaaccccaacgccaauccuaacgcaaauccaaacgccaaucccaacgcuaauccuaacgcgaauccaaacgcaaaucccaacgccaauccgaacgcuaauccuaacgccaauccaaacgcaaaccccaaugccaacccuaaugcuaaccccaaugccaacccagcagcguacauuaaaccuggaagcgcuaauaagcccaaagacgaauuggauuacgccaacgacauagagaagaagaucuguaaaauggaaaagugcagugcagccuaugagccauccgauaaacauauuaaggaguaccucaauaaaauccagaacucucugugaggacuagucccuguucccagagcccacuuuuuuuucuuuuuuugaaauaaaauagccugucuuucagaucucaaaggcucuuuucagagccaccaaaaaaaaaaaaaaaaaaaaaaaaaaaaaaaaaaaaaaaaaaaaaaaaaaaaaaaaaaaaaaaaaaaaaaaaaaaaaaaaaaaaaaaaaaaaaaaaaaaaa

SEQ ID NO: 9824 - RNA, 1301 nt, Artificial Sequence
  mRNA Design a-1 (hSL-A100) comprising derived and/or modified sequence from Pf(3D7)__XP_001351122.1__HsALB_Pf-CSP(19-272)_L(AAY)_Pf-CSP(346-3 75)_L(AAY)_Pf-CSP(310-327)_L(AAY)_PADRE (opt3)
aggagagucccgcagucggcguccagcggcucugcuuguucgugugugugucguugcaggccuuauucaagcuuaccaugaagugggugaccuucaucagccugcucuuucuuuucuccucugccuacucacuguuucaggaguaucaaugcuacggcaguagcuccaacacaagagucuugaaugaauuaaacuaugacaaugcugggacuaaccuguacaaugagcuagaaaugaacuauuacggaaaacaggagaauugguauucucucaagaaaaacucgaggucacugggugaaaaugaugacggcaacaaugaggauaacgagaaacuucggaagcccaagcacaagaaacugaagcagccugcagacgggaauccagauccgaacgccaaucccaacguugacccuaacgcgaauccaaacguggaucccaaugcuaacccuaauguagacccaaacgccaaucccaacgcaaauccuaacgccaauccaaacgcuaauccgaacgcaaaucccaacgccaacccuaaugcuaacccaaaugccaaccccaaugcgaacccuaaugcaaacccaaaugccaaccccaaugcuaacccgaaugccaacccuaaugcaaaccccaacgcuaauccaaacgccaauccuaacgcgaaucccaacguggauccaaaugccaaccccaaugcaaacccuaaugcuaacccaaaugccaacccgaaugcuaaccccaacgccaauccuaacgcaaauccaaacgccaaucccaacgcuaauccuaacgcgaauccaaacgcaaaucccaacgccaauccgaacgcuaauccuaacgccaauccaaacgcaaaccccaaugccaacccuaaugcuaaccccaaugccaacccagcagcguacauuaaaccuggaagcgcuaauaagcccaaagacgaauuggauuacgccaacgacauagagaagaagaucuguaaaauggaaaagugcagugcagccuaugagccauccgauaaacauauuaaggaguaccucaauaaaauccagaacucucuggcugccuaugcaaaguucgucgcugccuggacgcugaaagcggccgcuugaggacuagucccuguucccagagcccacuuuuuuuucuuuuuuugaaauaaaauagccugucuuucagaucucaaaggcucuuuucagagccaccaaaaaaaaaaaaaaaaaaaaaaaaaaaaaaaaaaaaaaaaaaaaaaaaaaaaaaaaaaaaaaaaaaaaaaaaaaaaaaaaaaaaaaaaaaaaaaaaaaaaa

SEQ ID NO: 9825 - RNA, 1301 nt, Artificial Sequence
  mRNA Design a-1 (hSL-A100) comprising derived and/or modified sequence from Pf(3D7)__XP_001351122.1__HsALB_Pf-CSP(19-272)_L(AAY)_Pf-CSP(310-3 27)_L(AAY)_Pf-CSP(346-375)_L(AAY)_PADRE (opt3)
aggagagucccgcagucggcguccagcggcucugcuuguucgugugugugucguugcaggccuuauucaagcuuaccaugaagugggugaccuucaucagccugcucuuucuuuucuccucugccuacucacuguuucaggaguaucaaugcuacggcaguagcuccaacacaagagucuugaaugaauuaaacuaugacaaugcugggacuaaccuguacaaugagcuagaaaugaacuauuacggaaaacaggagaauugguauucucucaagaaaaacucgaggucacugggugaaaaugaugacggcaacaaugaggauaacgagaaacuucggaagcccaagcacaagaaacugaagcagccugcagacgggaauccagauccgaacgccaaucccaacguugacccuaacgcgaauccaaacguggaucccaaugcuaacccuaauguagacccaaacgccaaucccaacgcaaauccuaacgccaauccaaacgcuaauccgaacgcaaaucccaacgccaacccuaaugcuaacccaaaugccaaccccaaugcgaacccuaaugcaaacccaaaugccaaccccaaugcuaacccgaaugccaacccuaaugcaaaccccaacgcuaauccaaacgccaauccuaacgcgaaucccaacguggauccaaaugccaaccccaaugcaaacccuaaugcuaacccaaaugccaacccgaaugcuaaccccaacgccaauccuaacgcaaauccaaacgccaaucccaacgcuaauccuaacgcgaauccaaacgcaaaucccaacgccaauccgaacgcuaauccuaacgccaauccaaacgcaaaccccaaugccaacccuaaugcuaaccccaaugccaacccagcagcguacgaaccuagcgacaaacauauuaaggaguacuugaauaaaauacagaacagucucgcugccuauaucaagcccggauccgcaaauaagccaaaagaugaacuggacuacgccaacgauauugagaagaaaaucuguaagauggagaaaugcucugcugccuaugcaaaguucgucgcugccuggacgcugaaagcggccgcuugaggacuagucccuguucccagagcccacuuuuuuuucuuuuuuugaaauaaaauagccugucuuucagaucucaaaggcucuuuucagagccaccaaaaaaaaaaaaaaaaaaaaaaaaaaaaaaaaaaaaaaaaaaaaaaaaaaaaaaaaaaaaaaaaaaaaaaaaaaaaaaaaaaaaaaaaaaaaaaaaaaaaa

SEQ ID NO: 9826 - RNA, 1355 nt, Artificial Sequence
  mRNA Design a-1 (hSL-A100) comprising derived and/or modified sequence from Pf(3D7)__XP_001351122.1__HsALB_Pf-CSP(19-272)_L(AAY)_Pf-CSP(310-3 27)_L(AAY)_Pf-CSP(346-375)_L(AAY)_PADRE_L(AAY)_P2 (opt3)
aggagagucccgcagucggcguccagcggcucugcuuguucgugugugugucguugcaggccuuauucaagcuuaccaugaagugggugaccuucaucagccugcucuuucuuuucuccucugccuacucacuguuucaggaguaucaaugcuacggcaguagcuccaacacaagagucuugaaugaauuaaacuaugacaaugcugggacuaaccuguacaaugagcuagaaaugaacuauuacggaaaacaggagaauugguauucucucaagaaaaacucgaggucacugggugaaaaugaugacggcaacaaugaggauaacgagaaacuucggaagcccaagcacaagaaacugaagcagccugcagacgggaauccagauccgaacgccaaucccaacguugacccuaacgcgaauccaaacguggaucccaaugcuaacccuaauguagacccaaacgccaaucccaacgcaaauccuaacgccaauccaaacgcuaauccgaacgcaaaucccaacgccaacccuaaugcuaacccaaaugccaaccccaaugcgaacccuaaugcaaacccaaaugccaaccccaaugcuaacccgaaugccaacccuaaugcaaaccccaacgcuaauccaaacgccaauccuaacgcgaaucccaacguggauccaaaugccaaccccaaugcaaacccuaaugcuaacccaaaugccaacccgaaugcuaaccccaacgccaauccuaacgcaaauccaaacgccaaucccaacgcuaauccuaacgcgaauccaaacgcaaaucccaacgccaauccgaacgcuaauccuaacgccaauccaaacgcaaaccccaaugccaacccuaaugcuaaccccaaugccaacccagcagcguacgaaccuagcgacaaacauauuaaggaguacuugaauaaaauacagaacagucucgcugccuauaucaagcccggauccgcaaauaagccaaaagaugaacuggacuacgccaacgauauugagaagaaaaucuguaagauggagaaaugcucugcugccuaugcaaaguucgucgcugccuggacgcugaaagcggccgcugcagccuaccaauauauuaaggcuaauagcaaguuuaucggcauaaccgaacucugaggacuagucccuguucccagagcccacuuuuuuuucuuuuuuugaaauaaaauagccugucuuucagaucucaaaggcucuuuucagagccaccaaaaaaaaaaaaaaaaaaaaaaaaaaaaaaaaaaaaaaaaaaaaaaaaaaaaaaaaaaaaaaaaaaaaaaaaaaaaaaaaaaaaaaaaaaaaaaaaaaaaa

SEQ ID NO: 9827 - RNA, 1319 nt, Artificial Sequence
  mRNA Design a-1 (hSL-A100) comprising derived and/or modified sequence from Pf(3D7)__XP_001351122.1__HsALB_Pf-CSP(19-272)_L(AAY)_Pf-CSP(310-3 27)_Linker (AAY)_Pf-CSP(346-397) (opt3)
aggagagucccgcagucggcguccagcggcucugcuuguucgugugugugucguugcaggccuuauucaagcuuaccaugaagugggugaccuucaucagccugcucuuucuuuucuccucugccuacucacuguuucaggaguaucaaugcuacggcaguagcuccaacacaagagucuugaaugaauuaaacuaugacaaugcugggacuaaccuguacaaugagcuagaaaugaacuauuacggaaaacaggagaauugguauucucucaagaaaaacucgaggucacugggugaaaaugaugacggcaacaaugaggauaacgagaaguuacggaaacccaagcacaagaaacugaagcagccugcagacgggaauccagauccgaacgccaaucccaacguugacccuaacgcgaauccaaacguggaucccaaugcuaacccuaauguagacccaaacgccaaucccaacgcaaauccuaacgccaauccaaacgcuaauccgaacgcaaaucccaacgccaacccuaaugcuaacccaaaugccaaccccaaugcgaacccuaaugcaaacccaaaugccaaccccaaugcuaacccgaaugccaacccuaaugcaaaccccaacgcuaauccaaacgccaauccuaacgcgaaucccaacguggauccaaaugccaaccccaaugcaaacccuaaugcuaacccaaaugccaacccgaaugcuaaccccaacgccaauccuaacgcaaauccaaacgccaaucccaacgcuaauccuaacgcgaauccaaacgcaaaucccaacgccaauccgaacgcuaauccuaacgccaauccaaacgcaaaccccaaugccaacccuaaugcuaaccccaaugccaacccagcagcguacgaaccuagcgacaaacauauuaaggaguacuugaauaaaauacagaacagucucgcugccuauaucaagcccggauccgcaaauaagccaaaagaugaacuggacuacgccaacgauauugagaagaaaaucuguaagauggagaaaugcucuagcgucuucaaugugguuaacuccucaauuggccugaucauggugcucaguuuucuuuuccugaauugaggacuagucccuguucccagagcccacuuuuuuuucuuuuuuugaaauaaaauagccugucuuucagaucucaaaggcucuuuucagagccaccaaaaaaaaaaaaaaaaaaaaaaaaaaaaaaaaaaaaaaaaaaaaaaaaaaaaaaaaaaaaaaaaaaaaaaaaaaaaaaaaaaaaaaaaaaaaaaaaaaaaa

SEQ ID NO: 9828 - RNA, 1919 nt, Artificial Sequence
  mRNA Design a-1 (hSL-A100) comprising derived and/or modified sequence from Pf(3D7)__XP_001351122.1__LumSynt_L(GGS4-GGG)_Pf-CSP(19-397) (opt4)
aggagagucccgcagucggcguccagcggcucugcuuguucgugugugugucguugcaggccuuauucaagcuuaccaugcagaucuacgagggcaagcugaccgccgagggccugagauucggcaucguggccagcagauucaaccacgcccugguggacagacugguggagggcgccaucgacgccaucgugagacacggcggcagagaggaggacaucacccuggugagagugcccggcagcugggagauccccguggccgccggcgagcuggccagaaaggaggacaucgacgccgugaucgccaucggcgugcugaucagaggcgccaccccccacuucgacuacaucgccagcgaggugagcaagggccuggccgaccugagccuggagcugagaaagcccaucaccuucggcgugaucaccgccgacacccuggagcaggccaucgagagagccggcaccaagcacggcaacaagggcugggaggccgcccugagcgccaucgagauggccaaccuguucaagagccugagaggcggcagcggcggcagcggcggcagcggcggcagcggcggcggccuguuccaggaguaccagugcuacggcagcagcagcaacaccagagugcugaacgagcugaacuacgacaacgccggcaccaaccuguacaacgagcuggagaugaacuacuacggcaagcaggagaacugguacagccugaagaagaacagcagaagccugggcgagaacgacgacggcaacaacgaggacaacgagaagcugagaaagcccaagcacaagaagcugaagcagcccgccgacggcaaccccgaccccaacgccaaccccaacguggaccccaacgccaaccccaacguggaccccaacgccaaccccaacguggaccccaacgccaaccccaacgccaaccccaacgccaaccccaacgccaaccccaacgccaaccccaacgccaaccccaacgccaaccccaacgccaaccccaacgccaaccccaacgccaaccccaacgccaaccccaacgccaaccccaacgccaaccccaacgccaaccccaacgccaaccccaacgccaaccccaacgccaaccccaacguggaccccaacgccaaccccaacgccaaccccaacgccaaccccaacgccaaccccaacgccaaccccaacgccaaccccaacgccaaccccaacgccaaccccaacgccaaccccaacgccaaccccaacgccaaccccaacgccaaccccaacgccaaccccaacgccaaccccaacgccaaccccaacgccaaccccaacgccaaccccaacgccaaccccaacaagaacaaccagggcaacggccagggccacaacaugcccaacgaccccaacagaaacguggacgagaacgccaacgccaacagcgccgugaagaacaacaacaacgaggagcccagcgacaagcacaucaaggaguaccugaacaagauccagaacagccugagcaccgaguggagccccugcagcgugaccugcggcaacggcauccaggugagaaucaagcccggcagcgccaacaagcccaaggacgagcuggacuacgccaacgacaucgagaagaagaucugcaagauggagaagugcagcagcguguucaacguggugaacagcagcaucggccugaucauggugcugagcuuccuguuccugaacugaggacuagucccuguucccagagcccacuuuuuuuucuuuuuuugaaauaaaauagccugucuuucagaucucaaaggcucuuuucagagccaccaaaaaaaaaaaaaaaaaaaaaaaaaaaaaaaaaaaaaaaaaaaaaaaaaaaaaaaaaaaaaaaaaaaaaaaaaaaaaaaaaaaaaaaaaaaaaaaaaaaaa

SEQ ID NO: 9829 - RNA, 1781 nt, Artificial Sequence
  mRNA Design a-1 (hSL-A100) comprising derived and/or modified sequence from Pf(3D7)__XP_001351122.1__HsALB_Pf-CSP(19-272)_L(PVTN)_HBsAg (opt4)
aggagagucccgcagucggcguccagcggcucugcuuguucgugugugugucguugcaggccuuauucaagcuuaccaugaagugggugaccuucaucagccugcuguuccuguucagcagcgccuacagccuguuccaggaguaccagugcuacggcagcagcagcaacaccagagugcugaacgagcugaacuacgacaacgccggcaccaaccuguacaacgagcuggagaugaacuacuacggcaagcaggagaacugguacagccugaagaagaacagcagaagccugggcgagaacgacgacggcaacaacgaggacaacgagaagcugagaaagcccaagcacaagaagcugaagcagcccgccgacggcaaccccgaccccaacgccaaccccaacguggaccccaacgccaaccccaacguggaccccaacgccaaccccaacguggaccccaacgccaaccccaacgccaaccccaacgccaaccccaacgccaaccccaacgccaaccccaacgccaaccccaacgccaaccccaacgccaaccccaacgccaaccccaacgccaaccccaacgccaaccccaacgccaaccccaacgccaaccccaacgccaaccccaacgccaaccccaacgccaaccccaacgccaaccccaacguggaccccaacgccaaccccaacgccaaccccaacgccaaccccaacgccaaccccaacgccaaccccaacgccaaccccaacgccaaccccaacgccaaccccaacgccaaccccaacgccaaccccaacgccaaccccaacgccaaccccaacgccaaccccaacgccaaccccaacgccaaccccaacgccaaccccaacgccaaccccaacgccaacccccccgugaccaacauggagaacaucaccagcggcuuccugggcccccugcuggugcugcaggccggcuucuuccugcugaccagaauccugaccaucccccagagccuggacagcugguggaccagccugaacuuccugggcggcagccccgugugccugggccagaacagccagagccccaccagcaaccacagccccaccagcugcccccccaucugccccggcuacagauggaugugccugagaagauucaucaucuuccuguucauccugcugcugugccugaucuuccugcuggugcugcuggacuaccagggcaugcugcccgugugcccccugauccccggcagcaccaccaccaacaccggccccugcaagaccugcaccacccccgcccagggcaacagcauguuccccagcugcugcugcaccaagcccaccgacggcaacugcaccugcauccccauccccagcagcugggccuucgccaaguaccugugggagugggccagcgugagauucagcuggcugagccugcuggugcccuucgugcagugguucgugggccugagccccaccguguggcugagcgccaucuggaugaugugguacuggggccccagccuguacagcaucgugagccccuucaucccccugcugcccaucuucuucugccuguggguguacaucugaggacuagucccuguucccagagcccacuuuuuuuucuuuuuuugaaauaaaauagccugucuuucagaucucaaaggcucuuuucagagccaccaaaaaaaaaaaaaaaaaaaaaaaaaaaaaaaaaaaaaaaaaaaaaaaaaaaaaaaaaaaaaaaaaaaaaaaaaaaaaaaaaaaaaaaaaaaaaaaaaaaaa

SEQ ID NO: 9830 - RNA, 1898 nt, Artificial Sequence
  mRNA Design a-1 (hSL-A100) comprising derived and/or modified sequence from Pf(3D7)__XP_001351122.1__HsALB_Pf-CSP(19-272)_L(AAY)_Pf-CSP(346-3 65)_L(AAY)_PADRE_L(PVTN)_HBsAg (opt4)
aggagagucccgcagucggcguccagcggcucugcuuguucgugugugugucguugcaggccuuauucaagcuuaccaugaagugggugaccuucaucagccugcuguuccuguucagcagcgccuacagccuguuccaggaguaccagugcuacggcagcagcagcaacaccagagugcugaacgagcugaacuacgacaacgccggcaccaaccuguacaacgagcuggagaugaacuacuacggcaagcaggagaacugguacagccugaagaagaacagcagaagccugggcgagaacgacgacggcaacaacgaggacaacgagaagcugagaaagcccaagcacaagaagcugaagcagcccgccgacggcaaccccgaccccaacgccaaccccaacguggaccccaacgccaaccccaacguggaccccaacgccaaccccaacguggaccccaacgccaaccccaacgccaaccccaacgccaaccccaacgccaaccccaacgccaaccccaacgccaaccccaacgccaaccccaacgccaaccccaacgccaaccccaacgccaaccccaacgccaaccccaacgccaaccccaacgccaaccccaacgccaaccccaacgccaaccccaacgccaaccccaacgccaaccccaacguggaccccaacgccaaccccaacgccaaccccaacgccaaccccaacgccaaccccaacgccaaccccaacgccaaccccaacgccaaccccaacgccaaccccaacgccaaccccaacgccaaccccaacgccaaccccaacgccaaccccaacgccaaccccaacgccaaccccaacgccaaccccaacgccaaccccaacgccaaccccaacgccaaccccgccgccuacaucaagcccggcagcgccaacaagcccaaggacgagcuggacuacgccaacgacaucgaggccgccuacgccaaguucguggccgccuggacccugaaggccgccgcccccgugaccaacauggagaacaucaccagcggcuuccugggcccccugcuggugcugcaggccggcuucuuccugcugaccagaauccugaccaucccccagagccuggacagcugguggaccagccugaacuuccugggcggcagccccgugugccugggccagaacagccagagccccaccagcaaccacagccccaccagcugcccccccaucugccccggcuacagauggaugugccugagaagauucaucaucuuccuguucauccugcugcugugccugaucuuccugcuggugcugcuggacuaccagggcaugcugcccgugugcccccugauccccggcagcaccaccaccaacaccggccccugcaagaccugcaccacccccgcccagggcaacagcauguuccccagcugcugcugcaccaagcccaccgacggcaacugcaccugcauccccauccccagcagcugggccuucgccaaguaccugugggagugggccagcgugagauucagcuggcugagccugcuggugcccuucgugcagugguucgugggccugagccccaccguguggcugagcgccaucuggaugaugugguacuggggccccagccuguacagcaucgugagccccuucaucccccugcugcccaucuucuucugccuguggguguacaucugaggacuagucccuguucccagagcccacuuuuuuuucuuuuuuugaaauaaaauagccugucuuucagaucucaaaggcucuuuucagagccaccaaaaaaaaaaaaaaaaaaaaaaaaaaaaaaaaaaaaaaaaaaaaaaaaaaaaaaaaaaaaaaaaaaaaaaaaaaaaaaaaaaaaaaaaaaaaaaaaaaaaa

SEQ ID NO: 9831 - RNA, 2117 nt, Artificial Sequence
  mRNA Design a-1 (hSL-A100) comprising derived and/or modified sequence from Pf(3D7)__XP_001351122.1__HsALB_Pf-CSP(19-384)_L(PVTN)_HBsAg (opt4)
aggagagucccgcagucggcguccagcggcucugcuuguucgugugugugucguugcaggccuuauucaagcuuaccaugaagugggugaccuucaucagccugcuguuccuguucagcagcgccuacagccuguuccaggaguaccagugcuacggcagcagcagcaacaccagagugcugaacgagcugaacuacgacaacgccggcaccaaccuguacaacgagcuggagaugaacuacuacggcaagcaggagaacugguacagccugaagaagaacagcagaagccugggcgagaacgacgacggcaacaacgaggacaacgagaagcugagaaagcccaagcacaagaagcugaagcagcccgccgacggcaaccccgaccccaacgccaaccccaacguggaccccaacgccaaccccaacguggaccccaacgccaaccccaacguggaccccaacgccaaccccaacgccaaccccaacgccaaccccaacgccaaccccaacgccaaccccaacgccaaccccaacgccaaccccaacgccaaccccaacgccaaccccaacgccaaccccaacgccaaccccaacgccaaccccaacgccaaccccaacgccaaccccaacgccaaccccaacgccaaccccaacgccaaccccaacguggaccccaacgccaaccccaacgccaaccccaacgccaaccccaacgccaaccccaacgccaaccccaacgccaaccccaacgccaaccccaacgccaaccccaacgccaaccccaacgccaaccccaacgccaaccccaacgccaaccccaacgccaaccccaacgccaaccccaacgccaaccccaacgccaaccccaacgccaaccccaacgccaaccccaacaagaacaaccagggcaacggccagggccacaacaugcccaacgaccccaacagaaacguggacgagaacgccaacgccaacagcgccgugaagaacaacaacaacgaggagcccagcgacaagcacaucaaggaguaccugaacaagauccagaacagccugagcaccgaguggagccccugcagcgugaccugcggcaacggcauccaggugagaaucaagcccggcagcgccaacaagcccaaggacgagcuggacuacgccaacgacaucgagaagaagaucugcaagauggagaagugcagcagcguguucaacguggugaacagcagccccgugaccaacauggagaacaucaccagcggcuuccugggcccccugcuggugcugcaggccggcuucuuccugcugaccagaauccugaccaucccccagagccuggacagcugguggaccagccugaacuuccugggcggcagccccgugugccugggccagaacagccagagccccaccagcaaccacagccccaccagcugcccccccaucugccccggcuacagauggaugugccugagaagauucaucaucuuccuguucauccugcugcugugccugaucuuccugcuggugcugcuggacuaccagggcaugcugcccgugugcccccugauccccggcagcaccaccaccaacaccggccccugcaagaccugcaccacccccgcccagggcaacagcauguuccccagcugcugcugcaccaagcccaccgacggcaacugcaccugcauccccauccccagcagcugggccuucgccaaguaccugugggagugggccagcgugagauucagcuggcugagccugcuggugcccuucgugcagugguucgugggccugagccccaccguguggcugagcgccaucuggaugaugugguacuggggccccagccuguacagcaucgugagccccuucaucccccugcugcccaucuucuucugccuguggguguacaucugaggacuagucccuguucccagagcccacuuuuuuuucuuuuuuugaaauaaaauagccugucuuucagaucucaaaggcucuuuucagagccaccaaaaaaaaaaaaaaaaaaaaaaaaaaaaaaaaaaaaaaaaaaaaaaaaaaaaaaaaaaaaaaaaaaaaaaaaaaaaaaaaaaaaaaaaaaaaaaaaaaaaa

SEQ ID NO: 9832 - RNA, 1934 nt, Artificial Sequence
  mRNA Design a-1 (hSL-A100) comprising derived and/or modified sequence from Pf(3D7)__XP_001351122.1__HsALB_Pf-CSP(19-384)_L(SGG)_Ferritin (opt4)
aggagagucccgcagucggcguccagcggcucugcuuguucgugugugugucguugcaggccuuauucaagcuuaccaugaagugggugaccuucaucagccugcuguuccuguucagcagcgccuacagccuguuccaggaguaccagugcuacggcagcagcagcaacaccagagugcugaacgagcugaacuacgacaacgccggcaccaaccuguacaacgagcuggagaugaacuacuacggcaagcaggagaacugguacagccugaagaagaacagcagaagccugggcgagaacgacgacggcaacaacgaggacaacgagaagcugagaaagcccaagcacaagaagcugaagcagcccgccgacggcaaccccgaccccaacgccaaccccaacguggaccccaacgccaaccccaacguggaccccaacgccaaccccaacguggaccccaacgccaaccccaacgccaaccccaacgccaaccccaacgccaaccccaacgccaaccccaacgccaaccccaacgccaaccccaacgccaaccccaacgccaaccccaacgccaaccccaacgccaaccccaacgccaaccccaacgccaaccccaacgccaaccccaacgccaaccccaacgccaaccccaacgccaaccccaacguggaccccaacgccaaccccaacgccaaccccaacgccaaccccaacgccaaccccaacgccaaccccaacgccaaccccaacgccaaccccaacgccaaccccaacgccaaccccaacgccaaccccaacgccaaccccaacgccaaccccaacgccaaccccaacgccaaccccaacgccaaccccaacgccaaccccaacgccaaccccaacgccaaccccaacaagaacaaccagggcaacggccagggccacaacaugcccaacgaccccaacagaaacguggacgagaacgccaacgccaacagcgccgugaagaacaacaacaacgaggagcccagcgacaagcacaucaaggaguaccugaacaagauccagaacagccugagcaccgaguggagccccugcagcgugaccugcggcaacggcauccaggugagaaucaagcccggcagcgccaacaagcccaaggacgagcuggacuacgccaacgacaucgagaagaagaucugcaagauggagaagugcagcagcguguucaacguggugaacagcagcagcggcggccugagcaaggacaucaucaagcugcugaacgagcaggugaacaaggagaugaacagcagcaaccuguacaugagcaugagcagcuggugcuacacccacagccuggacggcgccggccuguuccuguucgaccacgccgccgaggaguacgagcacgccaagaagcugaucaucuuccugaacgagaacaacgugcccgugcagcugaccagcaucagcgcccccgagcacaaguucgagggccugacccagaucuuccagaaggccuacgagcacgagcagcacaucagcgagagcaucaacaacaucguggaccacgccaucaagagcaaggaccacgccaccuucaacuuccugcagugguacguggccgagcagcacgaggaggaggugcuguucaaggacauccuggacaagaucgagcugaucggcaacgagaaccacggccuguaccuggccgaccaguacgugaagggcaucgccaagagcagaaagagcugaggacuagucccuguucccagagcccacuuuuuuuucuuuuuuugaaauaaaauagccugucuuucagaucucaaaggcucuuuucagagccaccaaaaaaaaaaaaaaaaaaaaaaaaaaaaaaaaaaaaaaaaaaaaaaaaaaaaaaaaaaaaaaaaaaaaaaaaaaaaaaaaaaaaaaaaaaaaaaaaaaaaa

SEQ ID NO: 9833 - RNA, 1895 nt, Artificial Sequence
  mRNA Design a-1 (hSL-A100) comprising derived and/or modified sequence from Pf(3D7)__XP_001351122.1__HsALB_Pf-CSP(93-384)_L(PVTN)_HBsAg (opt4)
aggagagucccgcagucggcguccagcggcucugcuuguucgugugugugucguugcaggccuuauucaagcuuaccaugaagugggugaccuucaucagccugcuguuccuguucagcagcgccuacagcaagcugaagcagcccgccgacggcaaccccgaccccaacgccaaccccaacguggaccccaacgccaaccccaacguggaccccaacgccaaccccaacguggaccccaacgccaaccccaacgccaaccccaacgccaaccccaacgccaaccccaacgccaaccccaacgccaaccccaacgccaaccccaacgccaaccccaacgccaaccccaacgccaaccccaacgccaaccccaacgccaaccccaacgccaaccccaacgccaaccccaacgccaaccccaacgccaaccccaacgccaaccccaacguggaccccaacgccaaccccaacgccaaccccaacgccaaccccaacgccaaccccaacgccaaccccaacgccaaccccaacgccaaccccaacgccaaccccaacgccaaccccaacgccaaccccaacgccaaccccaacgccaaccccaacgccaaccccaacgccaaccccaacgccaaccccaacgccaaccccaacgccaaccccaacgccaaccccaacaagaacaaccagggcaacggccagggccacaacaugcccaacgaccccaacagaaacguggacgagaacgccaacgccaacagcgccgugaagaacaacaacaacgaggagcccagcgacaagcacaucaaggaguaccugaacaagauccagaacagccugagcaccgaguggagccccugcagcgugaccugcggcaacggcauccaggugagaaucaagcccggcagcgccaacaagcccaaggacgagcuggacuacgccaacgacaucgagaagaagaucugcaagauggagaagugcagcagcguguucaacguggugaacagcagccccgugaccaacauggagaacaucaccagcggcuuccugggcccccugcuggugcugcaggccggcuucuuccugcugaccagaauccugaccaucccccagagccuggacagcugguggaccagccugaacuuccugggcggcagccccgugugccugggccagaacagccagagccccaccagcaaccacagccccaccagcugcccccccaucugccccggcuacagauggaugugccugagaagauucaucaucuuccuguucauccugcugcugugccugaucuuccugcuggugcugcuggacuaccagggcaugcugcccgugugcccccugauccccggcagcaccaccaccaacaccggccccugcaagaccugcaccacccccgcccagggcaacagcauguuccccagcugcugcugcaccaagcccaccgacggcaacugcaccugcauccccauccccagcagcugggccuucgccaaguaccugugggagugggccagcgugagauucagcuggcugagccugcuggugcccuucgugcagugguucgugggccugagccccaccguguggcugagcgccaucuggaugaugugguacuggggccccagccuguacagcaucgugagccccuucaucccccugcugcccaucuucuucugccuguggguguacaucugaggacuagucccuguucccagagcccacuuuuuuuucuuuuuuugaaauaaaauagccugucuuucagaucucaaaggcucuuuucagagccaccaaaaaaaaaaaaaaaaaaaaaaaaaaaaaaaaaaaaaaaaaaaaaaaaaaaaaaaaaaaaaaaaaaaaaaaaaaaaaaaaaaaaaaaaaaaaaaaaaaaaa

SEQ ID NO: 9834 - RNA, 1556 nt, Artificial Sequence; identical to SEQ ID NO: 8165
  mRNA Design a-1 (hSL-A100) comprising derived and/or modified sequence from Pf(3D7)__XP_001351122.1__HsALB_Pf-CSP(199-377)_L(PVTN)_HBsAg (opt4)

SEQ ID NO: 9835 - RNA, 1253 nt, Artificial Sequence
  mRNA Design a-1 (hSL-A100) comprising derived and/or modified sequence from Pf(3D7)__XP_001351122.1__HsALB_Pf-CSP(19-272)_L(AAY)_Pf-CSP(346-3 75)_L(AAY)_Pf-CSP(310-327) (opt4)
aggagagucccgcagucggcguccagcggcucugcuuguucgugugugugucguugcaggccuuauucaagcuuaccaugaagugggugaccuucaucagccugcuguuccuguucagcagcgccuacagccuguuccaggaguaccagugcuacggcagcagcagcaacaccagagugcugaacgagcugaacuacgacaacgccggcaccaaccuguacaacgagcuggagaugaacuacuacggcaagcaggagaacugguacagccugaagaagaacagcagaagccugggcgagaacgacgacggcaacaacgaggacaacgagaagcugagaaagcccaagcacaagaagcugaagcagcccgccgacggcaaccccgaccccaacgccaaccccaacguggaccccaacgccaaccccaacguggaccccaacgccaaccccaacguggaccccaacgccaaccccaacgccaaccccaacgccaaccccaacgccaaccccaacgccaaccccaacgccaaccccaacgccaaccccaacgccaaccccaacgccaaccccaacgccaaccccaacgccaaccccaacgccaaccccaacgccaaccccaacgccaaccccaacgccaaccccaacgccaaccccaacgccaaccccaacguggaccccaacgccaaccccaacgccaaccccaacgccaaccccaacgccaaccccaacgccaaccccaacgccaaccccaacgccaaccccaacgccaaccccaacgccaaccccaacgccaaccccaacgccaaccccaacgccaaccccaacgccaaccccaacgccaaccccaacgccaaccccaacgccaaccccaacgccaaccccaacgccaaccccgccgccuacaucaagcccggcagcgccaacaagcccaaggacgagcuggacuacgccaacgacaucgagaagaagaucugcaagauggagaagugcagcgccgccuacgagcccagcgacaagcacaucaaggaguaccugaacaagauccagaacagccugugaggacuagucccuguucccagagcccacuuuuuuuucuuuuuuugaaauaaaauagccugucuuucagaucucaaaggcucuuuucagagccaccaaaaaaaaaaaaaaaaaaaaaaaaaaaaaaaaaaaaaaaaaaaaaaaaaaaaaaaaaaaaaaaaaaaaaaaaaaaaaaaaaaaaaaaaaaaaaaaaaaaaa

SEQ ID NO: 9836 - RNA, 1301 nt, Artificial Sequence
  mRNA Design a-1 (hSL-A100) comprising derived and/or modified sequence from Pf(3D7)__XP_001351122.1__HsALB_Pf-CSP(19-272)_L(AAY)_Pf-CSP(346-3 75)_L(AAY)_Pf-CSP(310-327)_L(AAY)_PADRE (opt4)
aggagagucccgcagucggcguccagcggcucugcuuguucgugugugugucguugcaggccuuauucaagcuuaccaugaagugggugaccuucaucagccugcuguuccuguucagcagcgccuacagccuguuccaggaguaccagugcuacggcagcagcagcaacaccagagugcugaacgagcugaacuacgacaacgccggcaccaaccuguacaacgagcuggagaugaacuacuacggcaagcaggagaacugguacagccugaagaagaacagcagaagccugggcgagaacgacgacggcaacaacgaggacaacgagaagcugagaaagcccaagcacaagaagcugaagcagcccgccgacggcaaccccgaccccaacgccaaccccaacguggaccccaacgccaaccccaacguggaccccaacgccaaccccaacguggaccccaacgccaaccccaacgccaaccccaacgccaaccccaacgccaaccccaacgccaaccccaacgccaaccccaacgccaaccccaacgccaaccccaacgccaaccccaacgccaaccccaacgccaaccccaacgccaaccccaacgccaaccccaacgccaaccccaacgccaaccccaacgccaaccccaacgccaaccccaacguggaccccaacgccaaccccaacgccaaccccaacgccaaccccaacgccaaccccaacgccaaccccaacgccaaccccaacgccaaccccaacgccaaccccaacgccaaccccaacgccaaccccaacgccaaccccaacgccaaccccaacgccaaccccaacgccaaccccaacgccaaccccaacgccaaccccaacgccaaccccaacgccaaccccgccgccuacaucaagcccggcagcgccaacaagcccaaggacgagcuggacuacgccaacgacaucgagaagaagaucugcaagauggagaagugcagcgccgccuacgagcccagcgacaagcacaucaaggaguaccugaacaagauccagaacagccuggccgccuacgccaaguucguggccgccuggacccugaaggccgccgccugaggacuagucccuguucccagagcccacuuuuuuuucuuuuuuugaaauaaaauagccugucuuucagaucucaaaggcucuuuucagagccaccaaaaaaaaaaaaaaaaaaaaaaaaaaaaaaaaaaaaaaaaaaaaaaaaaaaaaaaaaaaaaaaaaaaaaaaaaaaaaaaaaaaaaaaaaaaaaaaaaaaaa

SEQ ID NO: 9837 - RNA, 1301 nt, Artificial Sequence
  mRNA Design a-1 (hSL-A100) comprising derived and/or modified sequence from Pf(3D7)__XP_001351122.1__HsALB_Pf-CSP(19-272)_L(AAY)_Pf-CSP(310-3 27)_L(AAY)_Pf-CSP(346-375)_L(AAY)_PADRE (opt4)
aggagagucccgcagucggcguccagcggcucugcuuguucgugugugugucguugcaggccuuauucaagcuuaccaugaagugggugaccuucaucagccugcuguuccuguucagcagcgccuacagccuguuccaggaguaccagugcuacggcagcagcagcaacaccagagugcugaacgagcugaacuacgacaacgccggcaccaaccuguacaacgagcuggagaugaacuacuacggcaagcaggagaacugguacagccugaagaagaacagcagaagccugggcgagaacgacgacggcaacaacgaggacaacgagaagcugagaaagcccaagcacaagaagcugaagcagcccgccgacggcaaccccgaccccaacgccaaccccaacguggaccccaacgccaaccccaacguggaccccaacgccaaccccaacguggaccccaacgccaaccccaacgccaaccccaacgccaaccccaacgccaaccccaacgccaaccccaacgccaaccccaacgccaaccccaacgccaaccccaacgccaaccccaacgccaaccccaacgccaaccccaacgccaaccccaacgccaaccccaacgccaaccccaacgccaaccccaacgccaaccccaacgccaaccccaacguggaccccaacgccaaccccaacgccaaccccaacgccaaccccaacgccaaccccaacgccaaccccaacgccaaccccaacgccaaccccaacgccaaccccaacgccaaccccaacgccaaccccaacgccaaccccaacgccaaccccaacgccaaccccaacgccaaccccaacgccaaccccaacgccaaccccaacgccaaccccaacgccaaccccgccgccuacgagcccagcgacaagcacaucaaggaguaccugaacaagauccagaacagccuggccgccuacaucaagcccggcagcgccaacaagcccaaggacgagcuggacuacgccaacgacaucgagaagaagaucugcaagauggagaagugcagcgccgccuacgccaaguucguggccgccuggacccugaaggccgccgccugaggacuagucccuguucccagagcccacuuuuuuuucuuuuuuugaaauaaaauagccugucuuucagaucucaaaggcucuuuucagagccaccaaaaaaaaaaaaaaaaaaaaaaaaaaaaaaaaaaaaaaaaaaaaaaaaaaaaaaaaaaaaaaaaaaaaaaaaaaaaaaaaaaaaaaaaaaaaaaaaaaaaa

SEQ ID NO: 9838 - RNA, 1355 nt, Artificial Sequence
  mRNA Design a-1 (hSL-A100) comprising derived and/or modified sequence from Pf(3D7)__XP_001351122.1__HsALB_Pf-CSP(19-272)_L(AAY)_Pf-CSP(310-3 27)_L(AAY)_Pf-CSP(346-375)_L(AAY)_PADRE_L(AAY)_P2 (opt4)
aggagagucccgcagucggcguccagcggcucugcuuguucgugugugugucguugcaggccuuauucaagcuuaccaugaagugggugaccuucaucagccugcuguuccuguucagcagcgccuacagccuguuccaggaguaccagugcuacggcagcagcagcaacaccagagugcugaacgagcugaacuacgacaacgccggcaccaaccuguacaacgagcuggagaugaacuacuacggcaagcaggagaacugguacagccugaagaagaacagcagaagccugggcgagaacgacgacggcaacaacgaggacaacgagaagcugagaaagcccaagcacaagaagcugaagcagcccgccgacggcaaccccgaccccaacgccaaccccaacguggaccccaacgccaaccccaacguggaccccaacgccaaccccaacguggaccccaacgccaaccccaacgccaaccccaacgccaaccccaacgccaaccccaacgccaaccccaacgccaaccccaacgccaaccccaacgccaaccccaacgccaaccccaacgccaaccccaacgccaaccccaacgccaaccccaacgccaaccccaacgccaaccccaacgccaaccccaacgccaaccccaacgccaaccccaacguggaccccaacgccaaccccaacgccaaccccaacgccaaccccaacgccaaccccaacgccaaccccaacgccaaccccaacgccaaccccaacgccaaccccaacgccaaccccaacgccaaccccaacgccaaccccaacgccaaccccaacgccaaccccaacgccaaccccaacgccaaccccaacgccaaccccaacgccaaccccaacgccaaccccgccgccuacgagcccagcgacaagcacaucaaggaguaccugaacaagauccagaacagccuggccgccuacaucaagcccggcagcgccaacaagcccaaggacgagcuggacuacgccaacgacaucgagaagaagaucugcaagauggagaagugcagcgccgccuacgccaaguucguggccgccuggacccugaaggccgccgccgccgccuaccaguacaucaaggccaacagcaaguucaucggcaucaccgagcugugaggacuagucccuguucccagagcccacuuuuuuuucuuuuuuugaaauaaaauagccugucuuucagaucucaaaggcucuuuucagagccaccaaaaaaaaaaaaaaaaaaaaaaaaaaaaaaaaaaaaaaaaaaaaaaaaaaaaaaaaaaaaaaaaaaaaaaaaaaaaaaaaaaaaaaaaaaaaaaaaaaaaa

SEQ ID NO: 9839 - RNA, 1319 nt, Artificial Sequence
  mRNA Design a-1 (hSL-A100) comprising derived and/or modified sequence from Pf(3D7)__XP_001351122.1__HsALB_Pf-CSP(19-272)_L(AAY)_Pf-CSP(310-3 27)_Linker (AAY)_Pf-CSP(346-397) (opt4)
aggagagucccgcagucggcguccagcggcucugcuuguucgugugugugucguugcaggccuuauucaagcuuaccaugaagugggugaccuucaucagccugcuguuccuguucagcagcgccuacagccuguuccaggaguaccagugcuacggcagcagcagcaacaccagagugcugaacgagcugaacuacgacaacgccggcaccaaccuguacaacgagcuggagaugaacuacuacggcaagcaggagaacugguacagccugaagaagaacagcagaagccugggcgagaacgacgacggcaacaacgaggacaacgagaagcugagaaagcccaagcacaagaagcugaagcagcccgccgacggcaaccccgaccccaacgccaaccccaacguggaccccaacgccaaccccaacguggaccccaacgccaaccccaacguggaccccaacgccaaccccaacgccaaccccaacgccaaccccaacgccaaccccaacgccaaccccaacgccaaccccaacgccaaccccaacgccaaccccaacgccaaccccaacgccaaccccaacgccaaccccaacgccaaccccaacgccaaccccaacgccaaccccaacgccaaccccaacgccaaccccaacgccaaccccaacguggaccccaacgccaaccccaacgccaaccccaacgccaaccccaacgccaaccccaacgccaaccccaacgccaaccccaacgccaaccccaacgccaaccccaacgccaaccccaacgccaaccccaacgccaaccccaacgccaaccccaacgccaaccccaacgccaaccccaacgccaaccccaacgccaaccccaacgccaaccccaacgccaaccccgccgccuacgagcccagcgacaagcacaucaaggaguaccugaacaagauccagaacagccuggccgccuacaucaagcccggcagcgccaacaagcccaaggacgagcuggacuacgccaacgacaucgagaagaagaucugcaagauggagaagugcagcagcguguucaacguggugaacagcagcaucggccugaucauggugcugagcuuccuguuccugaacugaggacuagucccuguucccagagcccacuuuuuuuucuuuuuuugaaauaaaauagccugucuuucagaucucaaaggcucuuuucagagccaccaaaaaaaaaaaaaaaaaaaaaaaaaaaaaaaaaaaaaaaaaaaaaaaaaaaaaaaaaaaaaaaaaaaaaaaaaaaaaaaaaaaaaaaaaaaaaaaaaaaaa

SEQ ID NO: 9840 - RNA, 1919 nt, Artificial Sequence
  mRNA Design a-1 (hSL-A100) comprising derived and/or modified sequence from Pf(3D7)__XP_001351122.1__LumSynt_L(GGS4-GGG)_Pf-CSP(19-397) (opt5)
aggagagucccgcagucggcguccagcggcucugcuuguucgugugugugucguugcaggccuuauucaagcuuaccaugcagaucuacgagggcaagcugaccgccgaagggcucagauucggaauuguggcuagccgguuuaaccacgcccuggucgaccgccuuguugagggcgcgaucgaugcuauugugagacaugggggacgggaagaggacaucacacuggugcgcguccccggcuccugggaaauuccuguggccgccggggagcucgcuagaaaagaggauaucgacgccguuaucgcuauuggagugcugauccggggcgccacgccgcacuucgauuauauugcgucugaagucagcaagggccuugccgaccugucccucgagcugcgcaaacccaucaccuuuggggugauuacagcugauacccuggaacaagccaucgagagagcuggaacaaagcauggcaauaaagggugggaggccgcgcucucugccauugaaauggcuaaccuguucaagagccuucggggaggcuccgggggaucuggcggcagcgggggauccggcgggggacuguuucaggaguaccagugcuauggcuccucuuccaauacccgcguucucaacgaacugaauuacgacaacgccgggacaaaucuuuauaacgagcuggaaaugaauuacuauggaaagcaggagaacugguacagccucaaaaagaacucuagaucccugggcgagaaugaugacggcaauaacgaagauaaugagaaacugcggaagccuaaacacaagaagcucaaacaacccgcugacgggaacccugaucccaacgccaauccuaacguggacccgaaugccaaccccaaugucgacccuaacgcuaaucccaacguggauccuaaugcgaaccccaaugccaacccgaaugcuaacccuaaugccaaccccaacgccaauccuaacgcuaaucccaacgccaaucccaacgcgaauccuaacgcuaauccgaacgccaaucccaacgccaauccuaacgcuaaucccaacgccaacccuaaugcuaaccccaaugccaacccgaaugcgaacccuaaugccaaccccaauguggacccuaacgcuaaucccaacgccaauccuaacgcuaaucccaacgccaacccgaaugcgaacccuaaugccaaccccaaugcuaaccccaaugccaacccuaaugcuaacccgaaugccaaccccaaugccaacccuaaugcuaaccccaaugcgaacccuaacgccaaucccaacgcuaauccuaacgccaaucccaacgccaauccgaacgcuaauccuaacaagaauaaccagggaaauggccaggggcauaacaugcccaaugauccuaaccgcaacgucgacgaaaaugccaacgcgaauagcgcuguuaaaaacaauaacaaugaggaacccucugauaagcacaucaaagaguaccugaacaagauccagaauagccuuagcaccgagugguccccguguucugugacgugcggaaacggcauucaagugagaaucaaaccugggagcgccaauaagcccaaggacgaacuggauuaugccaacgacauugagaaaaagaucuguaaaauggaaaagugcuccagcgucuucaaugugguuaacucuuccauuggccucaucauggugcugagcuuucuuuuccugaauugaggacuagucccuguucccagagcccacuuuuuuuucuuuuuuugaaauaaaauagccugucuuucagaucucaaaggcucuuuucagagccaccaaaaaaaaaaaaaaaaaaaaaaaaaaaaaaaaaaaaaaaaaaaaaaaaaaaaaaaaaaaaaaaaaaaaaaaaaaaaaaaaaaaaaaaaaaaaaaaaaaaaa

SEQ ID NO: 9841 - RNA, 1781 nt, Artificial Sequence
  mRNA Design a-1 (hSL-A100) comprising derived and/or modified sequence from Pf(3D7)__XP_001351122.1__HsALB_Pf-CSP(19-272)_L(PVTN)_HBsAg (opt5)
aggagagucccgcagucggcguccagcggcucugcuuguucgugugugugucguugcaggccuuauucaagcuuaccaugaagugggugaccuucaucagccugcucuuucuguucuccucugccuacagccuuuuucaggaguaucaaugcuacggcuccucuagcaacacaagaguccugaaugaacucaacuaugacaaugcugggacgaaccuguacaaugagcuugaaaugaacuauuacggaaaacaggagaauugguauucccugaagaaaaacucucggagccucggcgaaaaugaugacgggaacaaugaggauaacgagaagcugcgcaaacccaagcacaagaaacugaagcagccugccgacggaaauccggaucccaacgcgaauccuaacguugaccccaacgcuaauccuaacguggaucccaaugccaacccuaauguggacccgaacgccaaucccaacgcuaauccuaacgccaaucccaacgcuaauccuaacgccaaucccaacgcgaacccgaaugccaacccuaaugcuaaccccaaugccaacccuaaugcuaaccccaaugccaaccccaaugcgaacccuaaugccaacccgaaugcuaaccccaacgccaauccuaacgcuaaucccaacgccaauccuaacgucgaucccaaugccaacccgaaugcuaacccuaaugcgaaccccaaugccaacccuaaugcuaaccccaacgccaauccuaacgccaaucccaacgcuaauccgaacgccaauccuaacgcgaaucccaacgcuaaucccaacgccaauccuaacgccaauccgaacgcuaaucccaacgccaacccuaaugcuaaccccaaugccaacccuaaugcgaaucccccugugaccaacauggaaaacauuacauccggcuuccucgggccccugcuuguucugcaggccggauuuuuccuccugaccagaauccuuacaauuccgcaaagccuggacucuugguggaccucccucaauuuucugggcggcagcccugugugucuggggcagaacucucagucccccacaagcaaucauucuccuaccuccugucccccgaucugcccuggauaccgguggaugugccuccgcagauucauuaucuuucuguucauccuucugcucugucugauuuuucuucugguccuccuggauuaccagggcaugcugcccgugugcccucucauccccgggagcacgaccacaaacaccggacccuguaaaacaugcaccacgccugcucaaggcaauuccauguucccgucuuguugcuguacaaagcccaccgacgggaacugcacaugcauuccuauccccagcuccugggccuuugcuaaauaucugugggagugggccagcguucgguucucuuggcuuucccugcucgugccuuucguccagugguuugugggacugagccccaccguguggcuuucugcgauuuggaugaugugguacuggggcccuagccuguauuccaucgucucuccguucauuccccuccugccuaucuuuuucugucuguggguuuacaucugaggacuagucccuguucccagagcccacuuuuuuuucuuuuuuugaaauaaaauagccugucuuucagaucucaaaggcucuuuucagagccaccaaaaaaaaaaaaaaaaaaaaaaaaaaaaaaaaaaaaaaaaaaaaaaaaaaaaaaaaaaaaaaaaaaaaaaaaaaaaaaaaaaaaaaaaaaaaaaaaaaaaa

SEQ ID NO: 9842 - RNA, 1898 nt, Artificial Sequence
  mRNA Design a-1 (hSL-A100) comprising derived and/or modified sequence from Pf(3D7)__XP_001351122.1__HsALB_Pf-CSP(19-272)_L(AAY)_Pf-CSP(346-3 65)_L(AAY)_PADRE_L(PVTN)_HBsAg (opt5)
aggagagucccgcagucggcguccagcggcucugcuuguucgugugugugucguugcaggccuuauucaagcuuaccaugaagugggugaccuucaucagccugcucuuucuguucuccucugccuacagccuuuuucaggaguaucaaugcuacggcuccucuagcaacacaagaguccugaaugaacucaacuaugacaaugcugggacgaaccuguacaaugagcuugaaaugaacuauuacggaaaacaggagaauugguauucccugaagaaaaacucucggagccucggcgaaaaugaugacgggaacaaugaggauaacgagaagcugcgcaaacccaagcacaagaaacugaagcagccugccgacggaaauccggaucccaacgcgaauccuaacguugaccccaacgcuaauccuaacguggaucccaaugccaacccuaauguggacccgaacgccaaucccaacgcuaauccuaacgccaaucccaacgcuaauccuaacgccaaucccaacgcgaacccgaaugccaacccuaaugcuaaccccaaugccaacccuaaugcuaaccccaaugccaaccccaaugcgaacccuaaugccaacccgaaugcuaaccccaacgccaauccuaacgcuaaucccaacgccaauccuaacgucgaucccaaugccaacccgaaugcuaacccuaaugcgaaccccaaugccaacccuaaugcuaaccccaacgccaauccuaacgccaaucccaacgcuaauccgaacgccaauccuaacgcgaaucccaacgcuaaucccaacgccaauccuaacgccaauccgaacgcuaaucccaacgccaacccuaaugcuaaccccaaugccaacccuaaugcgaaccccgccgcuuacauuaaaccuggcuccgccaauaagcccaaagacgaacucgauuacgcuaacgacaucgaggccgcguaugccaaguucguggcugccuggacccugaaggcugccgccccgguuacaaauauggaaaacauuaccagcggguuucuuggaccucugcucgugcugcaggcuggcuucuuucuucugacaagaauccucaccauuccccaaucucuggauuccugguggacaagccugaauuuccucggcgggucuccugucugucugggacagaacucccagagccccaccucuaaucauuccccgacgagcugcccucccaucuguccuggcuaccgguggaugugccuucgcagauuuaucauuuuccuguuuauccuccugcuuugucugauuuuccuccuggugcugcucgacuaucaggggaugcugcccguuugcccccuuaucccuggauccaccacaaccaacacaggcccguguaaaaccugcacgacacccgcgcaaggaaauucuauguuuccuagcuguugcuguaccaagcccacagacgggaacuguaccugcauuccuauccccuccagcugggccuucgcuaaauaccugugggagugggccucugugcgguucuccuggcucagccugcuugucccuuuugugcagugguucgugggccugucuccgaccgucuggcucagcgccauuuggaugaugugguauuggggccccucccuguacucuaucguuagcccuuuuaucccccugcucccuauuuucuuuugccuguggguguauaucugaggacuagucccuguucccagagcccacuuuuuuuucuuuuuuugaaauaaaauagccugucuuucagaucucaaaggcucuuuucagagccaccaaaaaaaaaaaaaaaaaaaaaaaaaaaaaaaaaaaaaaaaaaaaaaaaaaaaaaaaaaaaaaaaaaaaaaaaaaaaaaaaaaaaaaaaaaaaaaaaaaaaa

SEQ ID NO: 9843 - RNA, 2117 nt, Artificial Sequence
  mRNA Design a-1 (hSL-A100) comprising derived and/or modified sequence from Pf(3D7)__XP_001351122.1__HsALB_Pf-CSP(19-384)_L(PVTN)_HBsAg (opt5)
aggagagucccgcagucggcguccagcggcucugcuuguucgugugugugucguugcaggccuuauucaagcuuaccaugaagugggugaccuucaucagccugcucuuucuguucuccucugccuacagccuuuuucaggaguaucaaugcuacggcuccucuagcaacacaagaguccugaaugaacucaacuaugacaaugcugggacgaaccuguacaaugagcuugaaaugaacuauuacggaaaacaggagaauugguauucccugaagaaaaacucucggagccucggcgaaaaugaugacgggaacaaugaggauaacgagaagcugcgcaaacccaagcacaagaaacugaagcagccugccgacggaaauccggaucccaacgcgaauccuaacguugaccccaacgcuaauccuaacguggaucccaaugccaacccuaauguggacccgaacgccaaucccaacgcuaauccuaacgccaaucccaacgcuaauccuaacgccaaucccaacgcgaacccgaaugccaacccuaaugcuaaccccaaugccaacccuaaugcuaaccccaaugccaaccccaaugcgaacccuaaugccaacccgaaugcuaaccccaacgccaauccuaacgcuaaucccaacgccaauccuaacgucgaucccaaugccaacccgaaugcuaacccuaaugcgaaccccaaugccaacccuaaugcuaaccccaacgccaauccuaacgccaaucccaacgcuaauccgaacgccaauccuaacgcgaaucccaacgcuaaucccaacgccaauccuaacgccaauccgaacgcuaaucccaacgccaacccuaaugcuaaccccaaugccaacccuaaugcgaaccccaauaaaaacaaucagggcaacgggcaaggacauaauaugccuaacgaccccaauagaaacguggaugaaaaugccaacgcuaacuccgccguuaagaauaacaauaacgaggaaccgagcgacaaacacauuaaggaguaccucaauaagauccagaacucucuguccaccgaguggagcccuuguucugugacaugcggcaauggcauucagguccggaucaaacccggguccgcuaacaagccuaaagaugaacuugacuacgccaaugacauugagaagaaaaucuguaagauggaaaaaugcagcucuguguucaacguugucaauuccagccccgugaccaacauggagaauaucacauccggauuucugggcccgcuccuggugcuucaggcgggguucuuucugcucacccgcauucugacaaucccucaaucucuggauagcugguggaccucccucaacuuccugggaggcagccccgugugucuugggcaaaauucucaguccccuacgagcaaccauucucccaccagcugucccccuauuugcccgggauauagauggaugugccugcggcgcuuuaucauuuuccucuuuauccugcuucugugucucauuuuccugcugguccuccuggacuaccagggcaugcuucccguuugcccucugauccccggcuccacaaccacaaacaccgggccuuguaagacgugcacaacccccgcccagggaaauucuauguuuccuagcugcuguugcacaaagccgaccgauggcaacuguaccugcauccccauuccuuccagcugggcuuucgccaaauaucucugggaaugggcuucugugagauucuccuggcugagccuucuggugcccuuuguccagugguucguggggcucucuccuacaguuuggcuguccgccaucuggaugaugugguacuggggacccagccuguauuccauugugucuccguuuaucccucuccugcccauuuucuuuugucuuugggucuacaucugaggacuagucccuguucccagagcccacuuuuuuuucuuuuuuugaaauaaaauagccugucuuucagaucucaaaggcucuuuucagagccaccaaaaaaaaaaaaaaaaaaaaaaaaaaaaaaaaaaaaaaaaaaaaaaaaaaaaaaaaaaaaaaaaaaaaaaaaaaaaaaaaaaaaaaaaaaaaaaaaaaaaa

SEQ ID NO: 9844 - RNA, 1934 nt, Artificial Sequence
  mRNA Design a-1 (hSL-A100) comprising derived and/or modified sequence from Pf(3D7)__XP_001351122.1__HsALB_Pf-CSP(19-384)_L(SGG)_Ferritin (opt5)
aggagagucccgcagucggcguccagcggcucugcuuguucgugugugugucguugcaggccuuauucaagcuuaccaugaagugggugaccuucaucagccugcucuuucuguucuccucugccuacagccuuuuucaggaguaucaaugcuacggcuccucuagcaacacaagagugcugaaugaacucaacuaugacaaugcugggacgaaccuguacaaugagcuugaaaugaacuauuacggaaaacaggagaauugguauucccugaagaaaaacucucggagccucggcgaaaaugaugacgggaacaaugaggauaacgagaagcugcgcaaacccaagcacaagaaacugaagcagccugccgacggaaauccggaucccaacgcgaauccuaacguugaccccaacgcuaauccuaacguggaucccaaugccaacccuaauguggacccgaacgccaaucccaacgcuaauccuaacgccaaucccaacgcuaauccuaacgccaaucccaacgcgaacccgaaugccaacccuaaugcuaaccccaaugccaacccuaaugcuaaccccaaugccaaccccaaugcgaacccuaaugccaacccgaaugcuaaccccaacgccaauccuaacgcuaaucccaacgccaauccuaacgucgaucccaaugccaacccgaaugcuaacccuaaugcgaaccccaaugccaacccuaaugcuaaccccaacgccaauccuaacgccaaucccaacgcuaauccgaacgccaauccuaacgcgaaucccaacgcuaaucccaacgccaauccuaacgccaauccgaacgcuaaucccaacgccaacccuaaugcuaaccccaaugccaacccuaaugcgaaccccaauaaaaacaaucagggcaacgggcaaggacauaauaugccuaacgaccccaauagaaacguggaugaaaaugccaacgcuaacuccgccguuaagaauaacaauaacgaggaaccgagcgacaaacacauuaaggaguaccucaauaagauccagaacucucuguccaccgaguggagcccuuguucugugacaugcggcaauggcauucagguccggaucaaacccggguccgcuaacaagccuaaagaugaacuugacuacgccaaugacauugagaagaaaaucuguaagauggaaaaaugcagcucuguguucaacguugugaacuccagcuccggaggccugucuaaggauaucauuaagcuccugaaugagcaggucaauaaagaaaugaacagcuccaaucuuuauaugagcaugucuuccugguguuacacccauagccuggacggggcgggacucuuucuguucgaucacgccgcugaggaguaugaacaugccaagaaacugaucauuuuucucaacgagaacaaugugcccgugcaacugacaucuaucagcgcuccggaacacaaguucgagggccuuacccagauuuuucagaaagccuacgaacacgagcagcauaucuccgagucuauuaacaauaucgucgaccacgccaucaagagcaaggaucaugcuacauucaacuuucugcaaugguauguugcggaacagcacgaggaagagguccucuucaaagacauucuggauaagaucgaacuuauugggaaugagaaccacggacuguaccucgccgaccaguaugugaaaggcaucgcuaagucccgcaaaagcugaggacuagucccuguucccagagcccacuuuuuuuucuuuuuuugaaauaaaauagccugucuuucagaucucaaaggcucuuuucagagccaccaaaaaaaaaaaaaaaaaaaaaaaaaaaaaaaaaaaaaaaaaaaaaaaaaaaaaaaaaaaaaaaaaaaaaaaaaaaaaaaaaaaaaaaaaaaaaaaaaaaaa

SEQ ID NO: 9845 - RNA, 1895 nt, Artificial Sequence
  mRNA Design a-1 (hSL-A100) comprising derived and/or modified sequence from Pf(3D7)__XP_001351122.1__HsALB_Pf-CSP(93-384)_L(PVTN)_HBsAg (opt5)
aggagagucccgcagucggcguccagcggcucugcuuguucgugugugugucguugcaggccuuauucaagcuuaccaugaagugggugaccuucaucagccugcucuuucuguucuccucugccuacagcaaacuuaagcagcccgcugacggcaacccugauccgaaugccaaccccaaugucgacccuaacgcgaaucccaacguugauccuaaugcuaaccccaauguggacccuaacgccaauccgaacgccaaucccaacgcuaauccuaacgccaaccccaaugcuaacccuaaugccaaccccaaugcgaacccgaaugccaacccuaaugcuaaccccaaugccaacccuaaugcuaaccccaaugccaaccccaacgcgaauccuaacgccaauccgaacgcuaaucccaacgccaauccuaacgcuaaucccaacguggauccuaaugccaaccccaaugccaacccgaaugcuaacccuaacgcgaaucccaacgccaauccuaacgcuaaucccaacgccaauccuaacgccaaucccaacgcuaauccgaacgccaauccuaacgcgaaucccaacgcuaaccccaaugccaacccuaaugccaacccgaaugcuaaccccaaugccaacccuaaugcuaaccccaaugccaacccuaauaaaaacaaucaagggaacggacagggccacaauaugcccaacgacccuaacagaaaugucgaugagaacgcgaaugccaacuccgcugugaagaauaacaauaacgaggaacccucugacaaacauauuaaggaauaucugaauaagauccagaacagccucuccacagaguggucuccgugcagcguuacgugugggaaugggauucaggugcggaucaaaccuggcuccgccaacaagcccaaagaugaacuggacuacgcuaaugauauugagaagaaaaucugcaagauggagaaguguagcucugucuuuaacgugguuaauuccagcccugugaccaacauggaaaacaucacaucuggguuccuuggaccccugcucguccugcaagccggcuuuuuccugcucacccgcauucugacaaucccgcagucccuugacagcugguggaccucucugaauuuucucggcggguccccugugugccugggacagaacagccagucccccacaucuaaucacagcccuaccuccuguccucccauuugccccggcuauagauggaugugucuucggcgcuucaucauuuuucuguucauccuccugcugugccucauuuuucugcuugugcugcucgauuaccaagggaugcugccggucuguccccuuaucccuggaagcacgaccacaaacaccggccccugcaaaacauguaccacgccugcgcagggaaauucuauguuccccuccugcugcuguacaaagccuaccgacggaaacugcacauguaucccgauucccagcucuugggccuuugcuaaauaucugugggagugggccagcguuagauucuccuggcucucucugcuggugccuuucgugcagugguuugucggccucagccccaccguguggcuguccgcuaucuggaugaugugguacuggggcccuagccuuuauucuauuguuucccccuucaucccgcugcucccuaucuuuuucugccuguggguguacauuugaggacuagucccuguucccagagcccacuuuuuuuucuuuuuuugaaauaaaauagccugucuuucagaucucaaaggcucuuuucagagccaccaaaaaaaaaaaaaaaaaaaaaaaaaaaaaaaaaaaaaaaaaaaaaaaaaaaaaaaaaaaaaaaaaaaaaaaaaaaaaaaaaaaaaaaaaaaaaaaaaaaaa

SEQ ID NO: 9846 - RNA, 1556 nt, Artificial Sequence; identical to SEQ ID NO: 8195
  mRNA Design a-1 (hSL-A100) comprising derived and/or modified sequence from Pf(3D7)__XP_001351122.1__HsALB_Pf-CSP(199-377)_L(PVTN)_HBsAg (opt5)

SEQ ID NO: 9847 - RNA, 1253 nt, Artificial Sequence
  mRNA Design a-1 (hSL-A100) comprising derived and/or modified sequence from Pf(3D7)__XP_001351122.1__HsALB_Pf-CSP(19-272)_L(AAY)_Pf-CSP(346-3 75)_L(AAY)_Pf-CSP(310-327) (opt5)
aggagagucccgcagucggcguccagcggcucugcuuguucgugugugugucguugcaggccuuauucaagcuuaccaugaagugggugaccuucaucagccugcucuuucuguucuccucugccuacagccuuuuucaggaguaucaaugcuacggcuccucuagcaacacaagaguccugaaugaacucaacuaugacaaugcugggacgaaccuguacaaugagcuugaaaugaacuauuacggaaaacaggagaauugguauucccugaagaaaaacucucggagccucggcgaaaaugaugacgggaacaaugaggauaacgagaagcugcgcaaacccaagcacaagaaacugaagcagccugccgacggaaauccggaucccaacgcgaauccuaacguugaccccaacgcuaauccuaacguggaucccaaugccaacccuaauguggacccgaacgccaaucccaacgcuaauccuaacgccaaucccaacgcuaauccuaacgccaaucccaacgcgaacccgaaugccaacccuaaugcuaaccccaaugccaacccuaaugcuaaccccaaugccaaccccaaugcgaacccuaaugccaacccgaaugcuaaccccaacgccaauccuaacgcuaaucccaacgccaauccuaacgucgaucccaaugccaacccgaaugcuaacccuaaugcgaaccccaaugccaacccuaaugcuaaccccaacgccaauccuaacgccaaucccaacgcuaauccgaacgccaauccuaacgcgaaucccaacgcuaaucccaacgccaauccuaacgccaauccgaacgcuaaucccaacgccaacccuaaugcuaaccccaaugccaacccuaaugcgaaccccgccgcuuacauuaaaccuggcuccgccaauaagcccaaagacgaacucgauuacgcuaacgacaucgagaagaagauuuguaaaauggaaaagugcagcgccgcguaugagccgucugauaaacauaucaaggaguaccugaauaaaauucagaacucccuuugaggacuagucccuguucccagagcccacuuuuuuuucuuuuuuugaaauaaaauagccugucuuucagaucucaaaggcucuuuucagagccaccaaaaaaaaaaaaaaaaaaaaaaaaaaaaaaaaaaaaaaaaaaaaaaaaaaaaaaaaaaaaaaaaaaaaaaaaaaaaaaaaaaaaaaaaaaaaaaaaaaaaa

SEQ ID NO: 9848 - RNA, 1301 nt, Artificial Sequence
  mRNA Design a-1 (hSL-A100) comprising derived and/or modified sequence from Pf(3D7)__XP_001351122.1__HsALB_Pf-CSP(19-272)_L(AAY)_Pf-CSP(346-3 75)_L(AAY)_Pf-CSP(310-327)_L(AAY)_PADRE (opt5)
aggagagucccgcagucggcguccagcggcucugcuuguucgugugugugucguugcaggccuuauucaagcuuaccaugaagugggugaccuucaucagccugcucuuucuguucuccucugccuacagccuuuuucaggaguaucaaugcuacggcuccucuagcaacacaagaguccugaaugaacucaacuaugacaaugcugggacgaaccuguacaaugagcuugaaaugaacuauuacggaaaacaggagaauugguauucccugaagaaaaacucucggagccucggcgaaaaugaugacgggaacaaugaggauaacgagaagcugcgcaaacccaagcacaagaaacugaagcagccugccgacggaaauccggaucccaacgcgaauccuaacguugaccccaacgcuaauccuaacguggaucccaaugccaacccuaauguggacccgaacgccaaucccaacgcuaauccuaacgccaaucccaacgcuaauccuaacgccaaucccaacgcgaacccgaaugccaacccuaaugcuaaccccaaugccaacccuaaugcuaaccccaaugccaaccccaaugcgaacccuaaugccaacccgaaugcuaaccccaacgccaauccuaacgcuaaucccaacgccaauccuaacgucgaucccaaugccaacccgaaugcuaacccuaaugcgaaccccaaugccaacccuaaugcuaaccccaacgccaauccuaacgccaaucccaacgcuaauccgaacgccaauccuaacgcgaaucccaacgcuaaucccaacgccaauccuaacgccaauccgaacgcuaaucccaacgccaacccuaaugcuaaccccaaugccaacccuaaugcgaaccccgccgcuuacauuaaaccuggcuccgccaauaagcccaaagacgaacucgauuacgcuaacgacaucgagaagaagauuuguaaaauggaaaagugcagcgccgcguaugagccgucugauaaacauaucaaggaguaccugaauaaaauucagaacucccuugccgcuuaugccaaguucguggcugccuggacccugaaagccgcugcgugaggacuagucccuguucccagagcccacuuuuuuuucuuuuuuugaaauaaaauagccugucuuucagaucucaaaggcucuuuucagagccaccaaaaaaaaaaaaaaaaaaaaaaaaaaaaaaaaaaaaaaaaaaaaaaaaaaaaaaaaaaaaaaaaaaaaaaaaaaaaaaaaaaaaaaaaaaaaaaaaaaaaa

SEQ ID NO: 9849 - RNA, 1301 nt, Artificial Sequence
  mRNA Design a-1 (hSL-A100) comprising derived and/or modified sequence from Pf(3D7)__XP_001351122.1__HsALB_Pf-CSP(19-272)_L(AAY)_Pf-CSP(310-3 27)_L(AAY)_Pf-CSP(346-375)_L(AAY)_PADRE (opt5)
aggagagucccgcagucggcguccagcggcucugcuuguucgugugugugucguugcaggccuuauucaagcuuaccaugaagugggugaccuucaucagccugcucuuucuguucuccucugccuacagccuuuuucaggaguaucaaugcuacggcuccucuagcaacacaagaguccugaaugaacucaacuaugacaaugcugggacgaaccuguacaaugagcuugaaaugaacuauuacggaaaacaggagaauugguauucccugaagaaaaacucucggagccucggcgaaaaugaugacgggaacaaugaggauaacgagaagcugcgcaaacccaagcacaagaaacugaagcagccugccgacggaaauccggaucccaacgcgaauccuaacguugaccccaacgcuaauccuaacguggaucccaaugccaacccuaauguggacccgaacgccaaucccaacgcuaauccuaacgccaaucccaacgcuaauccuaacgccaaucccaacgcgaacccgaaugccaacccuaaugcuaaccccaaugccaacccuaaugcuaaccccaaugccaaccccaaugcgaacccuaaugccaacccgaaugcuaaccccaacgccaauccuaacgcuaaucccaacgccaauccuaacgucgaucccaaugccaacccgaaugcuaacccuaaugcgaaccccaaugccaacccuaaugcuaaccccaacgccaauccuaacgccaaucccaacgcuaauccgaacgccaauccuaacgcgaaucccaacgcuaaucccaacgccaauccuaacgccaauccgaacgcuaaucccaacgccaacccuaaugcuaaccccaaugccaacccuaaugcgaaccccgccgcuuacgaaccuuccgacaaacauauuaaggaguaccucaauaaaauccagaacagccuggccgcuuauauuaagcccggcucugccaauaagccgaaagaugaacuugacuacgcgaacgauaucgagaagaaaauuuguaagauggagaaaugcuccgccgcuuaugccaaguucguggcugccuggacccugaaagccgcugcgugaggacuagucccuguucccagagcccacuuuuuuuucuuuuuuugaaauaaaauagccugucuuucagaucucaaaggcucuuuucagagccaccaaaaaaaaaaaaaaaaaaaaaaaaaaaaaaaaaaaaaaaaaaaaaaaaaaaaaaaaaaaaaaaaaaaaaaaaaaaaaaaaaaaaaaaaaaaaaaaaaaaaa

SEQ ID NO: 9850 - RNA, 1355 nt, Artificial Sequence
  mRNA Design a-1 (hSL-A100) comprising derived and/or modified sequence from Pf(3D7)__XP_001351122.1__HsALB_Pf-CSP(19-272)_L(AAY)_Pf-CSP(310-3 27)_L(AAY)_Pf-CSP(346-375)_L(AAY)_PADRE_L(AAY)_P2 (opt5)
aggagagucccgcagucggcguccagcggcucugcuuguucgugugugugucguugcaggccuuauucaagcuuaccaugaagugggugaccuucaucagccugcucuuucuguucuccucugccuacagccuuuuucaggaguaucaaugcuacggcuccucuagcaacacaagaguccugaaugaacucaacuaugacaaugcugggacgaaccuguacaaugagcuugaaaugaacuauuacggaaaacaggagaauugguauucccugaagaaaaacucucggagccucggcgaaaaugaugacgggaacaaugaggauaacgagaagcugcgcaaacccaagcacaagaaacugaagcagccugccgacggaaauccggaucccaacgcgaauccuaacguugaccccaacgcuaauccuaacguggaucccaaugccaacccuaauguggacccgaacgccaaucccaacgcuaauccuaacgccaaucccaacgcuaauccuaacgccaaucccaacgcgaacccgaaugccaacccuaaugcuaaccccaaugccaacccuaaugcuaaccccaaugccaaccccaaugcgaacccuaaugccaacccgaaugcuaaccccaacgccaauccuaacgcuaaucccaacgccaauccuaacgucgaucccaaugccaacccgaaugcuaacccuaaugcgaaccccaaugccaacccuaaugcuaaccccaacgccaauccuaacgccaaucccaacgcuaauccgaacgccaauccuaacgcgaaucccaacgcuaaucccaacgccaauccuaacgccaauccgaacgcuaaucccaacgccaacccuaaugcuaaccccaaugccaacccuaaugcgaaccccgccgcuuacgaaccuuccgacaaacauauuaaggaguaccucaauaaaauccagaacagccuggccgcuuauauuaagcccggcucugccaauaagccgaaagaugaacuugacuacgcgaacgauaucgagaagaaaauuuguaagauggagaaaugcuccgccgcuuaugccaaguucguggcugccuggacccugaaagccgcugcggccgcuuaccaauauaucaaggccaauagcaaguuuaucgggauuacagaacucugaggacuagucccuguucccagagcccacuuuuuuuucuuuuuuugaaauaaaauagccugucuuucagaucucaaaggcucuuuucagagccaccaaaaaaaaaaaaaaaaaaaaaaaaaaaaaaaaaaaaaaaaaaaaaaaaaaaaaaaaaaaaaaaaaaaaaaaaaaaaaaaaaaaaaaaaaaaaaaaaaaaaa

SEQ ID NO: 9851 - RNA, 1319 nt, Artificial Sequence
  mRNA Design a-1 (hSL-A100) comprising derived and/or modified sequence from Pf(3D7)__XP_001351122.1__HsALB_Pf-CSP(19-272)_L(AAY)_Pf-CSP(310-3 27)_Linker (AAY)_Pf-CSP(346-397) (opt5)
aggagagucccgcagucggcguccagcggcucugcuuguucgugugugugucguugcaggccuuauucaagcuuaccaugaagugggugaccuucaucagccugcucuuucuguucuccucugccuacagccuuuuucaggaguaucaaugcuacggcuccucuagcaacacaagaguccugaaugaacucaacuaugacaaugcugggacgaaccuguacaaugagcuugaaaugaacuauuacggaaaacaggagaauugguauucccugaagaaaaacucucggagccucggcgaaaaugaugacgggaacaaugaggauaacgagaagcugcgcaaacccaagcacaagaaacugaagcagccugccgacggaaauccggaucccaacgcgaauccuaacguugaccccaacgcuaauccuaacguggaucccaaugccaacccuaauguggacccgaacgccaaucccaacgcuaauccuaacgccaaucccaacgcuaauccuaacgccaaucccaacgcgaacccgaaugccaacccuaaugcuaaccccaaugccaacccuaaugcuaaccccaaugccaaccccaaugcgaacccuaaugccaacccgaaugcuaaccccaacgccaauccuaacgcuaaucccaacgccaauccuaacgucgaucccaaugccaacccgaaugcuaacccuaaugcgaaccccaaugccaacccuaaugcuaaccccaacgccaauccuaacgccaaucccaacgcuaauccgaacgccaauccuaacgcgaaucccaacgcuaaucccaacgccaauccuaacgccaauccgaacgcuaaucccaacgccaacccuaaugcuaaccccaaugccaacccuaaugcgaaccccgccgcuuacgaaccuuccgacaaacauauuaaggaguaccucaauaaaauccagaacagccuggccgcuuauauuaagcccggcucugccaauaagccgaaagaugaacuugacuacgcgaacgauaucgagaagaaaauuuguaagauggagaaaugcuccagcguguucaauguugugaacucuuccaucgggcugaucaugguccucagcuuucuguuccuuaauugaggacuagucccuguucccagagcccacuuuuuuuucuuuuuuugaaauaaaauagccugucuuucagaucucaaaggcucuuuucagagccaccaaaaaaaaaaaaaaaaaaaaaaaaaaaaaaaaaaaaaaaaaaaaaaaaaaaaaaaaaaaaaaaaaaaaaaaaaaaaaaaaaaaaaaaaaaaaaaaaaaaaa

SEQ ID NO: 9852 - RNA, 1919 nt, Artificial Sequence
  mRNA Design a-1 (hSL-A100) comprising derived and/or modified sequence from Pf(3D7)__XP_001351122.1__LumSynt_L(GGS4-GGG)_Pf-CSP(19-397) (opt6)
aggagagucccgcagucggcguccagcggcucugcuuguucgugugugugucguugcaggccuuauucaagcuuaccaugcaaauauacgaaggaaaacuaacagcagaaggauuacgauucggcauaguagcaucaagguucaaccacgcauuaguagauagacuaguagaaggagcaauagacgcaauaguccgacauggaggacgagaagaagauauaacacuagucagaguaccagggagcugggaaaucccaguagcagcaggagaacucgcaagaaaagaagauaucgacgccguaaucgcaaucgggguacuaauaagaggcgcaacaccccauuucgacuacauagcaagcgaaguaucaaaaggauuagcagaccuaaguuuagaacuaagaaaaccuauuacauucggcgucauaacggcagacacauuagaacaagccaucgaaagagcaggaacaaaacacggaaacaaaggcugggaagcagcacuaagcgcaauugaaauggcaaauuuauucaaaucccuaagaggcggcucagguggcaguggaggaucaggaggaucaggaggaggccuauuccaagaauaucaaugcuacggaucgagcucgaauacacgcguauuaaacgaauuaaacuacgacaacgcaggaacaaaccuauacaacgaacuagaaaugaacuauuauggaaaacaagagaacugguacucccuaaaaaaaaacagucgaagcuuaggagaaaaugacgacggaaauaacgaagacaacgaaaaacuaagaaaacccaaacauaaaaaauuaaaacaacccgcugacggaaacccagacccaaacgcuaacccgaacguugauccaaaugcaaacccaaauguggauccaaaugcaaaccccaacguagauccaaaugcaaacccaaacgcaaaccccaaugccaacccaaacgccaacccuaaugcuaauccaaacgcaaacccaaacgcaaacccgaacgcaaauccaaacgcaaacccuaaugcuaacccaaaugcaaauccaaacgcaaacccaaacgcuaacccaaacgcaaacccaaaugcaaacccaaaugcaaacccaaacgcaaauccaaacguagacccaaacgcaaauccaaacgcaaauccaaacgcaaacccaaacgccaaccccaaugcaaauccgaacgcaaacccaaacgcaaacccaaacgcaaacccaaacgcaaacccaaaugccaacccaaacgcaaacccgaacgcaaacccaaacgcaaacccaaacgcaaacccuaaugcgaacccaaaugccaacccaaacgcaaaccccaacgcuaacccaaacaaaaacaaucaaggaaacggacaagggcacaacaugccaaacgauccaaacagaaaugucgacgaaaacgccaaugcaaacagugccguaaaaaauaauaacaacgaagaaccuucagacaaacacauaaaagaauacuuaaacaaaauacaaaacucauuaucaaccgaauggagcccauguucuguuacaugcggaaauggaauacaaguaagaauaaaaccaggaucagcaaacaaaccaaaagacgaauuagacuacgcaaaugauauagaaaaaaaaauaugcaagauggaaaaaugcaguucuguauuuaacguaguaaacagcucaauaggucuaauaaugguacuauccuuucuuuuccugaacuaaggacuagucccuguucccagagcccacuuuuuuuucuuuuuuugaaauaaaauagccugucuuucagaucucaaaggcucuuuucagagccaccaaaaaaaaaaaaaaaaaaaaaaaaaaaaaaaaaaaaaaaaaaaaaaaaaaaaaaaaaaaaaaaaaaaaaaaaaaaaaaaaaaaaaaaaaaaaaaaaaaaaa

SEQ ID NO: 9853 - RNA, 1781 nt, Artificial Sequence
  mRNA Design a-1 (hSL-A100) comprising derived and/or modified sequence from Pf(3D7)__XP_001351122.1__HsALB_Pf-CSP(19-272)_L(PVTN)_HBsAg (opt6)
aggagagucccgcagucggcguccagcggcucugcuuguucgugugugugucguugcaggccuuauucaagcuuaccaugaaauggguaaccuucaucucacuauuauucuuauuuucaucugcauacucacucuuccaagaauaccaaugcuacgguucaucuucuaacacaagaguacuaaacgaacuaaacuacgacaacgcaggaacaaaccucuauaacgaacuugaaaugaacuacuauggaaaacaagaaaacugguauucccuaaaaaaaaacucaagauccuuaggagaaaacgacgacggaaauaacgaagacaacgaaaaacuaagaaaaccaaaacacaaaaaacuaaaacaacccgcagacggaaacccagacccaaacgcaaacccaaacguagacccaaacgcaaacccaaacgucgacccaaacgccaauccaaacguagacccaaacgcuaacccaaacgccaauccaaacgcaaauccaaaugccaacccaaacgcaaacccaaaugcgaauccaaaugcaaaccccaaugcaaacccaaacgcaaauccaaacgcaaacccaaacgcaaacccuaacgcaaauccaaaugcaaacccuaacgcaaacccaaacgcaaauccaaacgcaaacccaaaugcaaauccaaacgucgacccaaacgcaaacccgaacgcaaacccaaacgcaaacccaaaugcaaauccaaaugcaaaccccaaugcaaacccaaacgcaaacccaaacgcuaacccaaaugcaaacccaaacgcaaacccaaacgcaaauccaaacgcaaacccaaacgcaaacccaaaugcaaacccaaacgcaaaccccaaugcaaauccaaacgcaaacccaaacgcaaacccacccguaaccaacauggaaaacaucacaucaggauuccuuggaccccucuuaguacuucaagcaggauucuuccuauuaacaagaauacuaacaauaccucaaucuuuagauucaugguggacuucauuaaauuuccuaggaggaagcccaguaugcuuaggacaaaacagccaaucaccaaccucaaaccacucaccaaccucaugcccaccaauaugcccaggauaccgauggaugugccuaagaagauucauaauauucuuauucauacuacuacuaugccucauauucuuacuaguacuauuagacuaccaaggaaugcugccagucugcccacuuauaccagguagcaccaccacuaacacaggaccuugcaaaacaugcacaacacccgcucaaggaaauucuauguuuccaucaugcugcugcacuaaacccacagauggcaauuguacaugcauaccaauccccucaucaugggcauuugccaaauacuuaugggaaugggcaucuguaagauucucuuggcuaucacucuuaguaccauucguacaaugguucguaggccuauccccuacaguauggcuauccgcaauauggaugaugugguacuggggaccaucacuauacucaauagucucacccuucauaccacuauuaccaauauucuucugccuauggguauauauauaaggacuagucccuguucccagagcccacuuuuuuuucuuuuuuugaaauaaaauagccugucuuucagaucucaaaggcucuuuucagagccaccaaaaaaaaaaaaaaaaaaaaaaaaaaaaaaaaaaaaaaaaaaaaaaaaaaaaaaaaaaaaaaaaaaaaaaaaaaaaaaaaaaaaaaaaaaaaaaaaaaaaa

SEQ ID NO: 9854 - RNA, 1898 nt, Artificial Sequence
  mRNA Design a-1 (hSL-A100) comprising derived and/or modified sequence from Pf(3D7)__XP_001351122.1__HsALB_Pf-CSP(19-272)_L(AAY)_Pf-CSP(346-3 65)_L(AAY)_PADRE_L(PVTN)_HBsAg (opt6)
aggagagucccgcagucggcguccagcggcucugcuuguucgugugugugucguugcaggccuuauucaagcuuaccaugaaaugggucaccuucauuuccuuauuauucuuauuuucguccgcauacucacuauuucaagaauaucaauguuacggaucaagcucaaacacccgcguacucaacgaacuaaacuacgacaacgcaggaacaaaccuauauaacgaacuagaaaugaauuauuacggaaaacaagaaaacugguauucacuuaaaaaaaacuccagaucccuuggcgaaaacgacgacggaaauaaugaagacaacgaaaaacuuagaaaaccaaaacauaaaaaacuaaaacaaccugcagacgguaacccagauccaaaugcuaacccaaauguagacccuaacgcuaacccaaacguagauccaaacgccaacccaaacguagauccaaacgcaaacccaaacgcaaauccaaaugcaaacccaaacgccaaccccaacgcaaacccaaaugcaaauccuaaugcaaaucccaacgcaaauccaaacgcaaauccaaaugcaaaccccaacgcaaacccaaaugcaaauccaaaugcaaauccaaaugcaaacccaaacgcaaacccaaaugcaaauccuaacgcaaacccaaacgucgaccccaacgcaaauccaaacgcaaacccaaacgcaaaccccaaugcaaacccaaaugcaaacccaaacgcaaacccaaacgcaaaccccaacgcaaauccaaacgcaaauccaaaugcaaauccaaacgcaaaccccaaugcaaaccccaaugcuaacccaaacgccaaucccaacgcaaacccaaacgcaaaucccaacgcaaauccaaacgcaaacccugcagcauacauaaaacccggcucugcuaauaaacccaaagaugaacucgacuaugccaacgacauagaagcagccuacgcaaaauucguagcugcauggacauuaaaagcagcagcaccagugacaaacauggaaaacauuacaucaggauucuuagguccauuauuaguccuccaagcaggauucuucuuacuaacuagaauauuaacaauaccacaaucccuagacucuugguggacuucacuaaauuuccuaggaggauccccaguaugucucggucaaaauucucaaucaccuacaucaaaccauucaccaacaagcugccccccaaucugucccggauacagauggaugugccuacgcagauucauuauauuucuauucauacuacuucuaugccuaauauuccuacuaguccuucuagacuaccaaggaaugcuacccguaugcccacuuauaccaggauccacaacaacaaacacagguccaugcaaaacaugcacaacaccagcccaagguaauucuauguucccaucaugcuguugcacaaaaccaacagacgguaacugcacaugcaucccaauacccucaucaugggcauucgcaaaauaccuaugggaaugggcuucaguaagauucuccugguuaucccuuuuagucccauucguacaaugguucguaggauuaucacccacuguauggcuaucagcaauauggaugaugugguauuggggcccaucucuuuacucaaucgucuccccuuuuauuccacuacuacccauauuuuucugccuauggguauacauuuaaggacuagucccuguucccagagcccacuuuuuuuucuuuuuuugaaauaaaauagccugucuuucagaucucaaaggcucuuuucagagccaccaaaaaaaaaaaaaaaaaaaaaaaaaaaaaaaaaaaaaaaaaaaaaaaaaaaaaaaaaaaaaaaaaaaaaaaaaaaaaaaaaaaaaaaaaaaaaaaaaaaaa

SEQ ID NO: 9855 - RNA, 2117 nt, Artificial Sequence
  mRNA Design a-1 (hSL-A100) comprising derived and/or modified sequence from Pf(3D7)__XP_001351122.1__HsALB_Pf-CSP(19-384)_L(PVTN)_HBsAg (opt6)
aggagagucccgcagucggcguccagcggcucugcuuguucgugugugugucguugcaggccuuauucaagcuuaccaugaaauggguaaccuucauaucucucuuauuccuuuuuucaucugcauauucacuauuucaagaauaucaauguuauggaucaucaucaaacacccgaguacucaacgaauuaaauuacgacaacgcagguacuaacuuauacaacgaauuagaaaugaauuacuauggaaaacaagaaaacugguauucccucaaaaaaaacucucgaucucuaggcgaaaacgacgacggcaacaacgaagacaacgaaaaacuacguaaacccaaacacaaaaaacuaaaacaaccagcagauggaaacccagacccaaacgcaaacccaaacguagacccaaacgcaaauccaaacguagacccgaacgcaaauccaaauguagaucccaaugcuaauccaaaugccaacccaaacgcaaacccuaacgcuaaucccaacgcaaacccaaacgcaaacccaaaugcaaacccaaacgcaaaccccaacgcaaacccaaaugcaaauccaaaugcaaauccaaacgccaacccaaaugccaacccaaacgcaaauccaaacgcuaaccccaacgcaaaccccaacgccaaucccaacguagaccccaacgcaaacccaaaugcaaauccaaacgcaaaccccaaugcaaacccaaacgcuaacccuaaugcaaacccaaacgccaacccaaaugcaaaccccaacgccaacccaaacgcaaauccaaacgcaaacccaaacgcuaacccaaacgccaacccaaacgcaaacccaaacgcuaacccaaacgcaaacccaaaugcaaacccaaaugcuaauccaaauaaaaacaaccaaggaaacggccaaggacauaauaugccuaacgacccaaacagaaacguagacgaaaaugcaaacgcaaacuccgcaguaaaaaauaacaauaacgaagaacccuccgacaaacauauaaaagaauaucuaaacaaaauacaaaauucacucucuacugaaugguccccaugcucaguaacauguggaaacggaauccaaguacgcauaaaaccaggaucagcaaacaaaccaaaagacgaacuagacuacgcaaacgauauagaaaaaaaaauaugcaaaauggaaaaaugcuccuccguauucaacguagucaauucaucuccaguaaccaauauggaaaauauaaccuccggauuccuaggaccacuacucguuuuacaagcaggauucuucuuacuaacaagaauacucacuauaccacaaucccuggauucuugguggacaucccuaaauuucuuaggcggaucacccguaugccuaggccaaaauagccaaaguccaacuucaaaccacuccccaacuucuugcccaccaauaugccccggcuacagauggaugugccuucgacgauucauaauauuucuauucauacuauuacuaugucuaauauuccuacucguucuauuagacuaccaaggaauguuaccaguuugcccacuaauaccugguucaacaaccacuaacacuggucccugcaaaacauguaccaccccagcccaaggaaacucaauguuccccucaugcuguugcacaaaaccaaccgacggaaauugcacaugcauacccauaccaucuucuugggcauuugcuaaauaucuaugggaaugggcaucaguacgcuucucauggcuaucucuacuaguaccauucguccaaugguucguaggccuaucaccaacaguauggcuaucugcaauauggaugaugugguacuggggucccuccuuauauucaauuguaucaccuuuuaucccacuccuacccauauucuucuguuuauggguauacauauaaggacuagucccuguucccagagcccacuuuuuuuucuuuuuuugaaauaaaauagccugucuuucagaucucaaaggcucuuuucagagccaccaaaaaaaaaaaaaaaaaaaaaaaaaaaaaaaaaaaaaaaaaaaaaaaaaaaaaaaaaaaaaaaaaaaaaaaaaaaaaaaaaaaaaaaaaaaaaaaaaaaaa

SEQ ID NO: 9856 - RNA, 1934 nt, Artificial Sequence
  mRNA Design a-1 (hSL-A100) comprising derived and/or modified sequence from Pf(3D7)__XP_001351122.1__HsALB_Pf-CSP(19-384)_L(SGG)_Ferritin (opt6)
aggagagucccgcagucggcguccagcggcucugcuuguucgugugugugucguugcaggccuuauucaagcuuaccaugaaauggguaacauuuauaucucuauuauucuuauucuccucagcauacucacucuuucaagaauaccaaugcuacgguucuucauccaacacacgaguccuaaacgaauuaaacuacgacaaugcaggaaccaaucuauacaaugaacuugaaaugaacuacuacggaaaacaagaaaacugguacucccuaaaaaaaaacucacgaagccuaggagaaaaugacgacggaaacaacgaagacaacgaaaaacuacgaaaacccaaacacaaaaaacuaaaacaacccgccgacggcaauccagauccaaacgcaaacccaaacguagaccccaacgccaacccaaacguagauccaaacgcaaauccaaauguugauccaaaugcaaaccccaacgcaaacccaaacgcaaacccaaacgcaaacccaaacgcaaacccaaacgcaaauccaaaugcaaaucccaacgcaaauccaaacgcaaauccaaaugcaaacccaaacgcuaaucccaacgcuaacccaaacgcaaacccaaacgcaaacccgaacgcuaacccaaacgcaaacccaaacgcaaaccccaacguagacccaaacgcaaacccaaacgcaaaccccaacgcaaacccaaacgcaaacccaaacgcaaaccccaacgcaaaccccaacgcaaacccaaacgccaaccccaaugcaaacccaaacgccaacccaaacgcaaacccaaacgcaaacccaaacgcaaacccaaacgcaaauccaaacgcaaacccaaacgcaaacccaaacgcaaacccaaaugcaaacccaaacaaaaacaaccaaggaaauggacaaggacacaacaugccaaacgacccaaaccguaacguagaugaaaaugccaacgcaaacucagccguaaaaaacaacaacaacgaagaaccuucagacaaacacauaaaagaauacuuaaacaaaauacaaaacucauuaucaacugaauggucccccuguucagucacaugcggaaauggaauacaaguaagaauuaaaccagguucagccaacaaaccaaaagacgaacuagacuacgcaaacgacauugaaaaaaaaauauguaaaauggaaaaauguaguucagucuucaacguaguaaacucaucauccggaggauuauccaaagacauaauaaaacucuuaaaugaacaaguaaacaaagaaaugaacucgagcaaccucuauaugucaaugucauccuggugcuacacccauucccuagacggcgccggacuauuccuguucgaccaugcagcagaagaauaugaacacgcaaaaaagcuaaucaucuucuuaaacgaaaacaaugucccaguacaacuaaccuccauaucagcaccugaacauaaauucgaaggacuaacacaaauauuucaaaaagcauacgaacacgaacaacacauaucagaaucaauuaauaacauaguagaccacgcaaucaaaagcaaggaccacgcaacauucaacuuucuacaaugguacguagcagaacaacaugaagaagaaguacucuucaaagacaucuuagacaaaauugaacucauaggaaacgaaaaucacggacucuaccucgcagaccaguacguaaaaggaaucgcaaaaucacguaaaagcuaaggacuagucccuguucccagagcccacuuuuuuuucuuuuuuugaaauaaaauagccugucuuucagaucucaaaggcucuuuucagagccaccaaaaaaaaaaaaaaaaaaaaaaaaaaaaaaaaaaaaaaaaaaaaaaaaaaaaaaaaaaaaaaaaaaaaaaaaaaaaaaaaaaaaaaaaaaaaaaaaaaaaa

SEQ ID NO: 9857 - RNA, 1895 nt, Artificial Sequence
  mRNA Design a-1 (hSL-A100) comprising derived and/or modified sequence from Pf(3D7)__XP_001351122.1__HsALB_Pf-CSP(93-384)_L(PVTN)_HBsAg (opt6)
aggagagucccgcagucggcguccagcggcucugcuuguucgugugugugucguugcaggccuuauucaagcuuaccaugaaauggguaacuuuuauaucccuccuauuucuauuuucaucagccuauucaaaacuaaaacaacccgcagauggaaaucccgacccaaaugcaaauccaaauguagauccaaacgccaacccaaaugucgacccaaaugcaaacccaaacguagauccuaacgcaaacccaaaugcuaauccaaacgcuaacccaaacgcaaauccaaaugcuaacccaaacgcaaacccuaacgcaaacccaaacgcuaacccaaacgcaaacccaaacgccaacccaaacgcaaaccccaacgcaaacccuaacgcaaacccaaacgcaaacccaaaugccaacccaaacgcaaacccaaacgcaaacccaaacguagaccccaacgcuaauccaaaugcaaauccaaacgcaaacccaaaugccaacccaaacgccaacccuaaugcaaacccaaacgcaaacccaaaugcaaaccccaacgcaaauccaaacgcaaauccaaaugcaaacccaaacgcuaacccaaacgcaaaccccaaugcaaacccaaacgcaaauccaaaugcaaacccaaaugcaaauccaaaugcaaacccaaauaaaaacaaccaaggaaacggacaaggccauaacaugccaaacgacccaaaccgcaacgucgaugaaaacgccaacgcaaauucagcgguuaaaaacaacaacaaugaagaacccucagacaaacacauaaaagaauacuuaaacaaaauacaaaacucacuaucgacagaaugguccccaugcuccguaaccugcgguaauggaauacaagucagaauaaaaccaggaucagcuaauaaaccaaaagacgaauuagacuacgcaaacgacauagaaaagaaaauaugcaaaauggaaaaauguucuucaguauuuaacguagucaacucaucacccguaacuaacauggaaaacauaaccucaggauuucuagguccuuuacucguacuacaagcaggauuuuuccuacuuacccgaauccuaacaauaccucaaucucuagacucaugguggacaucccuaaauuucuuaggcggaucaccaguuugccucggacaaaacucucaaucaccaacuucaaaucacuccccaacaucuugcccaccaauaugcccaggauaucgauggaugugucuacgacguuuuauaauauuucuauuuauacuacuacucugucuaauauuccuauuaguacuacucgacuaucaaggaaugcuccccgucuguccccucauacccggaucaacaacuacaaacaccggaccgugcaaaaccugcacaaccccagcucaaggaaauucaauguucccaucaugcugcuguacaaaaccaacagauggaaacugcacaugcauaccaaucccaucaagcugggccuuugccaaauauuuaugggaaugggccuccgucagauucucauggcucucccuucuaguuccauucguacaaugguuuguaggccuauccccaaccguauggcuauccgccauauggaugaugugguauuggggaccaucacuauacucaauaguauccccauucauaccacuccuacccauauucuuuugccuauggguauacauuuaaggacuagucccuguucccagagcccacuuuuuuuucuuuuuuugaaauaaaauagccugucuuucagaucucaaaggcucuuuucagagccaccaaaaaaaaaaaaaaaaaaaaaaaaaaaaaaaaaaaaaaaaaaaaaaaaaaaaaaaaaaaaaaaaaaaaaaaaaaaaaaaaaaaaaaaaaaaaaaaaaaaaa

SEQ ID NO: 9858 - RNA, 1556 nt, Artificial Sequence
  mRNA Design a-1 (hSL-A100) comprising derived and/or modified sequence from Pf(3D7)__XP_001351122.1__HsALB_Pf-CSP(199-377)_L(PVTN)_HBsAg (opt6)
aggagagucccgcagucggcguccagcggcucugcuuguucgugugugugucguugcaggccuuauucaagcuuaccaugaaauggguaacauucauaucauuacucuucuuauuuuccucugcauacucagauccaaaugcaaacccaaaugcaaacccaaacgcaaacccaaaugccaauccaaaugcaaacccaaaugcaaacccaaacgcaaacccaaacgcaaacccaaacgcaaacccuaaugcaaacccaaaugcaaauccaaacgcuaacccaaacgcaaacccaaaugccaacccaaacgccaauccaaacgcaaacccaaacgcaaaucccaaugcaaacccuaacaaaaacaaucaaggaaacggacaaggccacaacaugccaaaugacccaaaccgcaauguagacgaaaaugccaacgcaaacuccgcuguaaaaaacaauaacaacgaagaaccuuccgauaaacauauaaaagaauacuuaaauaaaauacaaaauucauuaucaacagaauggucaccaugcucagucacaugcggaaauggaauacaaguaagaauaaaacccgguuccgcaaacaaaccaaaagacgaacuagacuacgcaaaugacaucgaaaaaaaaauaugcaaaauggaaaaauguucuucaguaccaguaacaaacauggaaaacaucaccucuggauuccuaggaccacuauuaguacuacaagcaggauucuuccuccuaacaagaauauuaacaauaccacaaucacuugacucaugguggacaucccucaauuuccuaggaggauccccaguaugucuaggucaaaacucucaaucuccaacauccaaccauucacccacaucaugcccucccauaugcccaggauaccgauggaugugccucagaagauucauaauauuccuauucauauuacuccuauguuuaaucuuucuacuagucuuauuagacuaccaaggaaugcuaccaguaugcccacuaaucccaggauccacaacaacaaacacaggccccugcaaaacauguacaacaccagcacaaggaaacucaauguucccaucaugcuguugcacaaaaccaacagacggaaacugcacaugcaucccaauaccaucaucuugggcauuugcaaaauacuuaugggaaugggcaucaguacgcuuuucauggcucucccuccucguaccauucguccaaugguucguaggucuaucaccaacaguuuggcuauccgcuauauggaugaugugguauuggggcccuucccuauacucaauaguuucaccauuuauaccacuccuaccaauauuuuucugccuuuggguauacauauaaggacuagucccuguucccagagcccacuuuuuuuucuuuuuuugaaauaaaauagccugucuuucagaucucaaaggcucuuuucagagccaccaaaaaaaaaaaaaaaaaaaaaaaaaaaaaaaaaaaaaaaaaaaaaaaaaaaaaaaaaaaaaaaaaaaaaaaaaaaaaaaaaaaaaaaaaaaaaaaaaaaaa

SEQ ID NO: 9859 - RNA, 1253 nt, Artificial Sequence
  mRNA Design a-1 (hSL-A100) comprising derived and/or modified sequence from Pf(3D7)__XP_001351122.1__HsALB_Pf-CSP(19-272)_L(AAY)_Pf-CSP(346-3 75)_L(AAY)_Pf-CSP(310-327) (opt6)
aggagagucccgcagucggcguccagcggcucugcuuguucgugugugugucguugcaggccuuauucaagcuuaccaugaaauggguaaccuucauuucacuucucuuccuauucuccagcgcauacucacucuuccaagaauaccaaugcuacggcucaaguuccaacacacgaguacuaaacgaauuaaacuacgacaaugcuggaaccaaccuauacaacgaacucgaaaugaacuacuacgguaaacaagaaaacugguauucacuaaaaaaaaacucaaggucccuaggagaaaacgacgacggaaacaacgaagacaacgaaaaauuaagaaaaccaaaacacaaaaaacuaaaacaacccgcagacggaaaccccgacccaaacgcaaacccaaacguagauccaaacgcaaacccaaacguagacccaaacgcaaacccaaacguagacccaaacgcaaacccuaaugcaaacccaaacgcaaacccaaacgcaaacccaaacgcaaacccaaacgcaaacccaaacgcaaaccccaacgccaacccaaacgcaaacccaaacgcaaacccaaacgcaaacccaaacgcaaacccaaacgcaaacccaaacgcaaacccaaacgcaaacccaaaugcaaacccaaacgcaaacccaaacguagacccaaacgcaaacccaaacgcaaacccaaaugcaaacccaaacgcaaacccaaacgcaaacccaaacgcuaacccaaacgcaaacccaaacgcuaauccaaaugcuaaccccaacgcaaacccaaaugcaaacccaaacgcuaauccaaaugcaaauccaaacgcaaacccaaacgcaaacccaaacgcaaacccaaacgcaaacccaaacgcaaauccagccgcauacauaaaacccggcucagcaaacaaaccaaaagacgaacuagacuacgccaacgacauagaaaaaaaaauaugcaaaauggaaaaaugcucagccgcauacgaaccaucagacaaacacaucaaagaauacuuaaacaaaauacaaaacagcuuauaaggacuagucccuguucccagagcccacuuuuuuuucuuuuuuugaaauaaaauagccugucuuucagaucucaaaggcucuuuucagagccaccaaaaaaaaaaaaaaaaaaaaaaaaaaaaaaaaaaaaaaaaaaaaaaaaaaaaaaaaaaaaaaaaaaaaaaaaaaaaaaaaaaaaaaaaaaaaaaaaaaaaa

SEQ ID NO: 9860 - RNA, 1301 nt, Artificial Sequence
  mRNA Design a-1 (hSL-A100) comprising derived and/or modified sequence from Pf(3D7)__XP_001351122.1__HsALB_Pf-CSP(19-272)_L(AAY)_Pf-CSP(346-3 75)_L(AAY)_Pf-CSP(310-327)_L(AAY)_PADRE (opt6)
aggagagucccgcagucggcguccagcggcucugcuuguucgugugugugucguugcaggccuuauucaagcuuaccaugaaauggguaacauucauaucacuacuauuccuauucucauccgccuacucacucuuucaagaauaucaaugcuacggaucaagcucaaauacaagaguacuaaacgaacuaaacuacgacaacgcaggaaccaaccuauacaacgaacuagaaaugaacuacuacggaaaacaagaaaacugguacucacuuaaaaaaaacucaagaucacuaggagaaaacgacgacggaaacaacgaagacaacgaaaaacuacgaaaaccaaaacauaaaaaacuaaaacaaccagcagacggaaacccagacccaaacgcaaauccaaacguagacccaaaugcaaacccaaacguagacccaaacgcaaacccaaacguagacccaaaugcaaacccaaacgcaaauccaaacgcaaacccaaacgcaaacccaaacgcaaacccaaacgcaaacccaaacgcaaacccaaaugcaaauccaaacgcaaacccaaaugcaaacccaaacgcaaacccaaacgcgaacccaaacgccaaccccaacgcaaacccaaacgcaaauccaaaugcaaacccaaacgccaauccaaacguagacccaaacgcaaauccaaacgcaaacccaaacgcaaacccaaacgcaaacccuaacgcaaacccaaacgcaaacccaaacgcaaacccaaacgccaacccaaacgcaaaccccaacgcaaacccaaacgcaaacccaaacgcaaaccccaacgcaaauccaaacgcuaacccaaacgcuaaccccaacgcaaacccaaaugcaaacccaaacgccaacccagccgcauacauaaaaccaggaucagcaaauaaaccaaaagacgaacuagacuacgcaaacgacauagaaaaaaaaauaugcaaaauggaaaaaugcuccgcagcauacgaaccaucagacaaacacaucaaagaauaccuaaacaaaauccaaaacucacuagccgccuacgcaaaauuugucgcagcauggacacucaaagcagcagcauaaggacuagucccuguucccagagcccacuuuuuuuucuuuuuuugaaauaaaauagccugucuuucagaucucaaaggcucuuuucagagccaccaaaaaaaaaaaaaaaaaaaaaaaaaaaaaaaaaaaaaaaaaaaaaaaaaaaaaaaaaaaaaaaaaaaaaaaaaaaaaaaaaaaaaaaaaaaaaaaaaaaaa

SEQ ID NO: 9861 - RNA, 1301 nt, Artificial Sequence
  mRNA Design a-1 (hSL-A100) comprising derived and/or modified sequence from Pf(3D7)__XP_001351122.1__HsALB_Pf-CSP(19-272)_L(AAY)_Pf-CSP(310-3 27)_L(AAY)_Pf-CSP(346-375)_L(AAY)_PADRE (opt6)
aggagagucccgcagucggcguccagcggcucugcuuguucgugugugugucguugcaggccuuauucaagcuuaccaugaaauggguaaccuucauaucccuacuauuucuauucuccucagcauacucacuauuccaagaauaccaaugcuacggcucaucaucaaacacaagaguacuaaaugaacuaaacuacgacaacgccggaaccaaccuauacaaugaacucgaaaugaauuacuacggaaaacaagaaaacugguacucacuaaaaaaaaacucaagaagccuaggagaaaacgacgacggaaacaacgaagacaacgaaaaauuacgaaaaccaaaacauaaaaaacuaaaacaacccgccgacggaaacccagacccaaacgcaaacccaaacguagacccaaacgcaaauccaaacguagacccaaacgcaaauccaaauguagacccaaacgcaaacccaaacgcaaacccaaacgcaaacccaaacgcaaacccgaacgcaaauccaaacgcaaacccaaacgcaaacccaaacgcaaacccaaacgcaaacccaaacgcaaaccccaacgcaaacccaaaugcaaacccaaacgcaaacccaaaugcaaauccaaacgcaaacccaaacgcaaacccaaacgcaaacccaaacguagacccaaaugcaaaccccaacgcaaacccaaacgcaaacccaaacgcaaacccaaacgcaaacccaaacgcaaacccaaacgcaaacccaaacgcaaacccaaacgccaauccaaacgcaaauccaaacgcaaacccaaacgcaaacccaaacgcaaacccaaacgcaaacccaaacgcaaacccaaacgcaaacccaaaugcaaacccaaacgcaaacccagcagcauacgaaccuucagacaaacacauaaaagaauacuuaaacaaaauacaaaacucacuagcagccuacaucaaaccaggauccgcaaacaaaccaaaagacgaacuagacuacgcaaacgacauagaaaaaaaaauauguaaaauggaaaaaugcucagccgcauaugcuaaauucgucgcagcauggaccuuaaaagcagcagcauaaggacuagucccuguucccagagcccacuuuuuuuucuuuuuuugaaauaaaauagccugucuuucagaucucaaaggcucuuuucagagccaccaaaaaaaaaaaaaaaaaaaaaaaaaaaaaaaaaaaaaaaaaaaaaaaaaaaaaaaaaaaaaaaaaaaaaaaaaaaaaaaaaaaaaaaaaaaaaaaaaaaaa

SEQ ID NO: 9862 - RNA, 1355 nt, Artificial Sequence
  mRNA Design a-1 (hSL-A100) comprising derived and/or modified sequence from Pf(3D7)__XP_001351122.1__HsALB_Pf-CSP(19-272)_L(AAY)_Pf-CSP(310-3 27)_L(AAY)_Pf-CSP(346-375)_L(AAY)_PADRE_L(AAY)_P2 (opt6)
aggagagucccgcagucggcguccagcggcucugcuuguucgugugugugucguugcaggccuuauucaagcuuaccaugaaaugggucaccuucaucucacuacuauuuuuauucuccagcgcauacucauuauuccaagaauaccaaugcuauggcucaagcucaaacacaagaguauuaaacgaacuaaacuacgauaacgccggaacaaaccuauacaacgaacucgaaaugaacuacuauggaaaacaagaaaacugguacucacuuaaaaaaaauucaagaucucuaggagaaaacgacgacggaaacaaugaagacaacgagaaauuaagaaaaccaaaacacaaaaaacuaaaacaaccagcagacggaaacccagacccaaacgcaaacccaaacguagacccaaacgcaaacccaaacguagacccaaacgcaaacccaaacguagauccgaacgcaaauccaaacgcaaauccaaacgcaaacccaaaugcaaacccaaaugcaaacccaaaugcaaacccaaacgcaaacccaaacgcaaacccaaacgcaaaccccaacgcaaacccaaacgcaaauccaaacgcaaacccaaacgcaaacccaaacgcaaaccccaacgcaaacccaaacgcaaacccgaacgcgaacccaaacguggauccaaacgcaaacccaaaugcaaaucccaacgcaaacccaaaugcaaacccaaacgcaaacccaaacgcaaacccaaacgcaaacccaaaugcaaacccaaacgcaaacccaaacgcaaacccaaacgcaaacccaaacgcaaauccaaacgcaaauccaaaugcaaacccaaacgcaaacccaaacgcaaaccccaacgcaaauccaaacgcaaacccagccgcauacgaaccaucagacaaacauauaaaagaauaucuaaacaaaauucaaaacucacucgcagcauacauaaaaccaggaagcgcaaacaaaccuaaagacgaacuagacuacgcaaacgacauagaaaaaaaaauaugcaaaauggaaaaaugcucagcagcguacgcaaaauucguagcagcauggacacuaaaagcagcagccgcagcauaccaauacauaaaagcaaauucaaaauucaucggaauuacagaacuauaaggacuagucccuguucccagagcccacuuuuuuuucuuuuuuugaaauaaaauagccugucuuucagaucucaaaggcucuuuucagagccaccaaaaaaaaaaaaaaaaaaaaaaaaaaaaaaaaaaaaaaaaaaaaaaaaaaaaaaaaaaaaaaaaaaaaaaaaaaaaaaaaaaaaaaaaaaaaaaaaaaaaa

SEQ ID NO: 9863 - RNA, 1319 nt, Artificial Sequence
  mRNA Design a-1 (hSL-A100) comprising derived and/or modified sequence from Pf(3D7)__XP_001351122.1__HsALB_Pf-CSP(19-272)_L(AAY)_Pf-CSP(310-3 27)_Linker (AAY)_Pf-CSP(346-397) (opt6)
aggagagucccgcagucggcguccagcggcucugcuuguucgugugugugucguugcaggccuuauucaagcuuaccaugaaauggguuacauucauaucauuacuauuccucuuuuccucagcauacucacucuuucaagaauaccaaugcuacggcucauccucaaacacaagaguacucaacgaacucaacuaugacaacgcaggaacaaaccucuacaacgaacuugaaaugaauuacuauggaaaacaagaaaacugguacucauuaaaaaaaaacucaagauccuuaggcgaaaacgacgacggaaacaacgaagacaacgagaaacuccgaaaaccaaaacacaaaaaacuaaaacaaccagcagacggaaacccagacccaaacgcaaacccaaacguagacccaaacgcaaacccaaacguagacccaaacgcaaacccaaacguagacccaaacgcaaacccaaacgcaaacccaaacgcaaacccaaacgcaaacccaaacgcaaacccaaacgcaaacccaaacgcaaacccaaacgcaaacccaaacgcaaacccaaacgcaaacccaaacgccaacccaaacgcaaacccaaacgccaacccaaacgcaaacccaaacgcaaacccaaacgcaaauccaaacgccaacccaaacguagacccaaacgcaaacccaaacgcaaacccaaacgcaaacccaaacgcaaaccccaacgccaacccaaacgccaaccccaacgcaaauccaaacgcaaacccaaacgcaaaccccaacgcaaacccaaacgcaaacccaaacgcaaacccaaacgcuaacccaaacgcaaaccccaacgcaaauccaaacgcaaacccaaacgcaaacccaaaugcaaacccagcagcauaugaaccuucagauaaacacauaaaagaauaccuaaacaaaauccaaaacucucucgcagccuacaucaaaccaggaucagcaaacaaacccaaagacgaacuagacuacgcaaaugauaucgaaaaaaaaauaugcaaaauggaaaaaugcucgagcguauuuaacguaguaaacucaucaaucggacucauaaugguacuaucauuucuauuccucaacuaaggacuagucccuguucccagagcccacuuuuuuuucuuuuuuugaaauaaaauagccugucuuucagaucucaaaggcucuuuucagagccaccaaaaaaaaaaaaaaaaaaaaaaaaaaaaaaaaaaaaaaaaaaaaaaaaaaaaaaaaaaaaaaaaaaaaaaaaaaaaaaaaaaaaaaaaaaaaaaaaaaaaa

SEQ ID NO: 9864 - RNA, 1919 nt, Artificial Sequence
  mRNA Design a-1 (hSL-A100) comprising derived and/or modified sequence from Pf(3D7)__XP_001351122.1__LumSynt_L(GGS4-GGG)_Pf-CSP(19-397) (opt11)
aggagagucccgcagucggcguccagcggcucugcuuguucgugugugugucguugcaggccuuauucaagcuuaccaugcaaauauacgagggcaaacucacggcugaaggccuacgcuuuggcaucgucgcaucacgguucaaucacgcacucguggacaggcucguagaaggugccaucgacgcaauaguacgccacggcgggcgcgaagaggacauaacgcuaguacgcguacccggaagcugggaaauccccguagccgcaggcgaacucgcacgcaaagaagacaucgacgccgugaucgcaauaggaguccugauccgaggcgcaacaccacacuucgacuacaucgccuccgaagucucaaaaggccuagcggaucugagccucgaacugcgcaaaccuauaacauucggcgucauaacagccgacacauuagaacaggccauagaaagagccggaaccaaacauggaaacaaaggcugggaagcggcccuaagcgccaucgaaauggcaaaccucuucaaaagccugcgcggaggaucaggcggcagcggcggcuccggaggaagcggcggcggucuuuuucaagaauaccaaugcuacggcuccucaucgaacacacgcguacucaaugaacugaacuacgacaaugcaggaaccaaccucuacaacgaacucgagaugaacuacuacggcaaacaagaaaacugguacucgcuaaagaaaaacuccagaucccugggcgaaaacgacgacggaaacaacgaagacaacgaaaaacuacgcaaaccaaaacacaagaaacuaaaacaaccagcagacggaaacccagacccaaacgcgaacccaaacgucgacccaaacgcaaacccaaacguagacccaaacgcaaacccaaacgucgaccccaacgcaaacccaaacgccaaccccaacgcaaaccccaacgcgaacccaaacgcgaaccccaacgcaaacccaaacgcaaaccccaacgcaaacccaaacgcaaacccaaacgccaacccgaaugccaacccgaacgcaaacccgaacgcaaaccccaacgcgaaccccaacgcaaacccaaaugccaaccccaacgcaaaccccaacguagacccgaacgcaaacccgaacgcaaacccgaacgcaaacccaaacgcaaacccaaacgccaaccccaacgccaacccaaacgcgaacccaaaugcaaaccccaacgccaacccgaacgccaacccaaacgcaaacccgaacgcaaaccccaacgcaaaccccaacgcaaaccccaacgcaaacccgaacgccaacccaaacgcaaacccaaacgcaaacccaaacaaaaacaaccaaggaaacgggcaaggccacaacaugcccaacgacccaaaccgaaauguagaugaaaacgcaaacgccaacagcgcggucaaaaacaacaacaacgaagaacccucggacaaacacauaaaagaauaccuaaacaaaauccagaacucccucucaacagaauggucccccugcucaguuaccugcgguaaugguauacaaguccgcauuaaaccgggaucugccaacaaaccaaaagaugagcuagacuacgccaacgacauagaaaagaaaaucugcaaaauggagaaaugcuccucagucuucaacguaguaaacagcucgauagggcucaucaugguacucuccuuuuuauuccucaacuaaggacuagucccuguucccagagcccacuuuuuuuucuuuuuuugaaauaaaauagccugucuuucagaucucaaaggcucuuuucagagccaccaaaaaaaaaaaaaaaaaaaaaaaaaaaaaaaaaaaaaaaaaaaaaaaaaaaaaaaaaaaaaaaaaaaaaaaaaaaaaaaaaaaaaaaaaaaaaaaaaaaaa

SEQ ID NO: 9865 - RNA, 1781 nt, Artificial Sequence
  mRNA Design a-1 (hSL-A100) comprising derived and/or modified sequence from Pf(3D7)__XP_001351122.1__HsALB_Pf-CSP(19-272)_L(PVTN)_HBsAg (opt11)
aggagagucccgcagucggcguccagcggcucugcuuguucgugugugugucguugcaggccuuauucaagcuuaccaugaaaugggucaccuucaucucccuccucuuccucuucuccucugccuacucacucuuccaagaauaccaaugcuacggcuccucuuccaacacccgcguacucaacgaacucaacuaugacaaugcaggaaccaaccuauacaacgagcuagagaugaacuacuacggcaaacaagaaaacugguacucccucaagaaaaacucacgcucccuuggcgaaaaugacgacggcaacaacgaagacaacgaaaaacuucgcaaacccaaacacaagaaauuaaaacaaccagccgacggcaacccagaccccaacgccaaccccaacgucgaccccaacgccaacccuaacgucgaccccaacgcaaacccuaacgucgauccaaacgccaaccccaacgcuaaccccaacgcaaauccgaacgcaaaccccaacgccaacccuaacgccaaccccaacgccaacccaaacgccaaccccaacgcuaaccccaacgcaaacccgaacgccaaccccaacgccaaccccaacgcaaaccccaacgccaaccccaaugcaaaccccaacgccaacccaaaugccaaccccaacgucgaccccaacgcaaaccccaacgcuaacccuaacgcuaacccaaacgccaacccaaacgcuaaccccaacgccaaccccaacgccaaccccaacgcaaacccaaacgcaaacccuaacgccaacccuaacgcaaaccccaacgcgaaccccaacgcaaaccccaacgcaaaccccaacgccaaccccaacgccaacccaaacgccaauccaaacgcaaaucccccagucaccaacauggaaaacaucaccucaggcuuccucggcccccuucucguccuacaagcugguuucuuccuucuaacccgcauccucacgaucccccaaucccucgacucaugguggaccucacucaacuuucucggaggcucacccguaugccucggacaaaacucccaaucccccaccuccaaccauuccccaaccucaugcccaccaauaugccccggcuaccguuggaugugccuccgccguuucaucauauuccuuuucauacuccuccucugccucaucuuccugcucgugcuccuagacuaucaagguaugcuacccguaugcccacucauccccggcucaaccacgacaaacacuggccccugcaaaacaugcaccacacccgcacaaggaaacuccauguuccccucaugcugcugcaccaaaccaacagacggaaacuguaccugcaucccuauccccuccuccugggccuucgcaaaauaucuaugggagugggccagcguacgcuuuuccuggcuuucccuccugguccccuucguccaaugguucguaggccucuccccaaccguauggcuauccgcaaucuggaugaugugguacuggggcccaucucucuacucaauaguaucacccuucaucccacuccuccccaucuucuucugccucuggguauacaucuaaggacuagucccuguucccagagcccacuuuuuuuucuuuuuuugaaauaaaauagccugucuuucagaucucaaaggcucuuuucagagccaccaaaaaaaaaaaaaaaaaaaaaaaaaaaaaaaaaaaaaaaaaaaaaaaaaaaaaaaaaaaaaaaaaaaaaaaaaaaaaaaaaaaaaaaaaaaaaaaaaaaaa

SEQ ID NO: 9866 - RNA, 1898 nt, Artificial Sequence
  mRNA Design a-1 (hSL-A100) comprising derived and/or modified sequence from Pf(3D7)__XP_001351122.1__HsALB_Pf-CSP(19-272)_L(AAY)_Pf-CSP(346-3 65)_L(AAY)_PADRE_L(PVTN)_HBsAg (opt11)
aggagagucccgcagucggcguccagcggcucugcuuguucgugugugugucguugcaggccuuauucaagcuuaccaugaaauggguaaccuucauaucccuucuauucuuauucucuuccgcauacucccucuuccaagaauaucagugcuacggcucauccucaaacacacgaguccucaacgaacucaacuacgacaacgccggcaccaaucucuacaacgaacucgaaaugaacuacuacggcaaacaagaaaacugguacucccuuaagaaaaacucacgcucucucggcgaaaacgacgacggcaacaacgaagacaacgaaaaauuacgcaaacccaaacacaagaaacucaaacaaccagccgacggcaacccagaccccaaugcaaacccuaacgucgaccccaacgccaacccuaacgucgacccaaacgccaacccgaacgucgaccccaacgcaaacccaaacgccaaccccaaugccaaucccaacgccaacccuaacgccaaccccaacgccaaccccaacgccaacccuaacgccaaccccaaugcaaacccaaacgccaacccaaacgcaaacccaaacgccaauccaaacgccaacccaaacgccaaccccaacgccaacccaaacgccaaucccaacgccaaccccaacguagaccccaaugcgaacccaaacgccaacccuaacgccaaccccaacgcaaacccaaacgcuaacccaaacgcaaaccccaacgcaaaccccaacgcaaacccgaacgcgaaccccaacgccaauccaaacgcaaacccuaacgcaaacccaaacgccaacccaaacgccaacccaaacgcaaacccaaacgccaauccaaacgcaaacccgaacgcaaaccccgccgcuuacaucaaacccggaucggccaacaaacccaaagacgaacuugauuacgccaacgacaucgaagcagccuacgcaaaauucguagcggccuggacccuaaaagcagcagcacccgucacaaacauggaaaacaucacaucuggcuucuuaggcccacuccuaguccuccaggccggcuucuuccuacuaacccguauacucaccauaccacaaucacucgacucaugguggaccucccuaaacuuccucggcggaucacccgucugccugggccaaaacucgcaaucccccaccucaaaucauucgcccacaucaugcccgcccaucugccccggcuaccgguggaugugccuccgcagauucauaaucuuccucuucauacuacuacuuugccuaaucuuccucuuaguccuacucgacuaccaaggcaugcuccccgucugcccccuuauacccggcuccaccaccaccaauaccggccccugcaaaaccugcacaacacccgcccaaggcaacucaauguucccguccugcuguugcaccaaaccaaccgacggaaauugcacaugcaucccaauccccucaucaugggcauucgccaaauaccucugggaaugggccuccguccguuucuccuggcucagccuacucguucccuucguccaaugguuugucggccuuucaccuacaguauggcuauccgccauauggaugaugugguacuggggacccucacucuacucaauugucucccccuucaucccauuacuccccaucuucuucugccucugggucuacauauaaggacuagucccuguucccagagcccacuuuuuuuucuuuuuuugaaauaaaauagccugucuuucagaucucaaaggcucuuuucagagccaccaaaaaaaaaaaaaaaaaaaaaaaaaaaaaaaaaaaaaaaaaaaaaaaaaaaaaaaaaaaaaaaaaaaaaaaaaaaaaaaaaaaaaaaaaaaaaaaaaaaaa

SEQ ID NO: 9867 - RNA, 2117 nt, Artificial Sequence
  mRNA Design a-1 (hSL-A100) comprising derived and/or modified sequence from Pf(3D7)__XP_001351122.1__HsALB_Pf-CSP(19-384)_L(PVTN)_HBsAg (opt11)
aggagagucccgcagucggcguccagcggcucugcuuguucgugugugugucguugcaggccuuauucaagcuuaccaugaaaugggucaccuucauaucacuccuauuccuauuuucaagcgccuacucccucuuccaagaauaucaaugcuauggcucaagcucaaacacccgcguccucaacgagcuaaacuacgacaacgcaggaaccaaccucuacaacgaacuggaaaugaacuacuacggaaaacaagagaacugguacuccuuaaagaaaaacucccgcucccucggcgaaaacgaugacgguaacaacgaagacaaugaaaaacuccgaaaacccaaacacaagaaacuaaaacaaccagccgacggaaaccccgacccgaacgcaaaccccaacguagacccaaacgcaaacccuaauguagacccaaacgccaacccaaacgucgacccaaacgcaaacccaaacgcuaaccccaacgccaacccaaacgccaaccccaacgccaaccccaaugccaacccaaacgcgaaccccaacgcaaaccccaacgccaacccgaacgccaacccaaacgccaacccaaacgccaaccccaacgcgaacccaaacgccaacccaaacgcuaaccccaacgcaaaccccaacgccaacccuaacgucgacccaaacgccaaucccaacgccaaccccaacgcaaaccccaacgccaacccgaacgcgaaccccaacgcaaaccccaacgcaaacccaaacgccaaccccaacgccaacccaaacgccaacccgaacgccaacccaaacgcgaaucccaaugccaaccccaacgccaauccuaaugcaaacccaaacgcaaaccccaacgccaauccgaacgcaaacccgaacaaaaacaaccaagguaacggccaaggccacaacaugcccaacgaccccaaccgcaacgucgacgaaaacgcaaacgccaacuccgcaguuaaaaacaacaacaacgaagaaccaucagacaaacacauaaaagaauaccucaacaaaauccaaaacucgcucuccaccgaauggucccccuguagcguaaccugcgguaauggaauacaaguccgaaucaaaccaggcucugccaacaaacccaaagacgaacuagacuacgccaacgacauugaaaagaaaaucugcaaaauggaaaaauguagcuccgucuucaacguagucaacuccucccccguuaccaacauggagaacauaaccuccggcuuccucggcccccuucucgugcuacaggccggauucuuccuccuaaccaggauccuaaccaucccccagucacucgacuccugguggaccucacucaacuuccucggcggaucccccgucugccucggacaaaacucccaaucccccaccucaaaccacuccccaaccucuugcccgcccauaugccccgguuaccgcuggaugugccuucgccgcuucaucauauuucuauucauccuccuucucugccuaauauuccuacucguacuccucgacuaccaaggcaugcuacccgucugcccucuuauacccggauccacgacaaccaacaccggccccugcaaaaccugcaccacacccgcccaaggcaacucuauguuccccucaugcugcugcacaaaacccaccgacggcaacugcacaugcauaccaauccccucuuccugggccuuugccaaauaccuuugggaaugggcuuccguccguuuuuccugguuaucccuccuggucccauucguccaaugguucgucggccuuucaccaaccgucuggcuauccgccaucuggaugaugugguacuggggucccucccucuacagcaucgucucaccauuuaucccccuccugcccaucuucuucugcuuguggguauacauaugaggacuagucccuguucccagagcccacuuuuuuuucuuuuuuugaaauaaaauagccugucuuucagaucucaaaggcucuuuucagagccaccaaaaaaaaaaaaaaaaaaaaaaaaaaaaaaaaaaaaaaaaaaaaaaaaaaaaaaaaaaaaaaaaaaaaaaaaaaaaaaaaaaaaaaaaaaaaaaaaaaaaa

SEQ ID NO: 9868 - RNA, 1934 nt, Artificial Sequence
  mRNA Design a-1 (hSL-A100) comprising derived and/or modified sequence from Pf(3D7)__XP_001351122.1__HsALB_Pf-CSP(19-384)_L(SGG)_Ferritin (opt11)
aggagagucccgcagucggcguccagcggcucugcuuguucgugugugugucguugcaggccuuauucaagcuuaccaugaaaugggucaccuucauaucacuacuuuuccuguucuccucagcauacucacucuuccaagaguaccaaugcuacggcucaucauccaauacccgcguacuuaacgaauuaaacuacgacaacgcaggcaccaaccucuacaacgaacucgaaaugaacuauuacggaaaacaagaaaacugguacucacuaaagaaaaacagcagaucccucggcgaaaacgacgacggcaauaacgaagacaacgaaaaacugagaaaaccuaaacacaagaaacucaaacaacccgcagacggcaaccccgaccccaacgccaacccaaacguagaccccaacgccaaccccaacgucgaccccaacgccaacccuaaugucgacccaaacgcaaacccuaacgcaaaccccaaugccaacccaaacgccaaccccaacgcaaaccccaacgcaaauccaaacgcaaaucccaacgcaaaccccaaugccaaccccaacgcaaacccaaacgccaaccccaacgcaaaccccaacgcuaacccaaacgccaacccaaacgcaaacccaaacgccaaccccaacgcuaaccccaacgucgaccccaacgccaaccccaacgcaaacccaaacgccaaccccaaugcaaacccaaacgccaaccccaacgcaaacccaaacgccaacccaaacgccaaccccaacgcaaaccccaacgcuaaccccaacgcaaaccccaaugcaaacccgaacgccaacccaaacgcaaacccaaacgccaacccaaacgccaaccccaacgccaacccaaacgccaacccaaacaaaaacaaccaagguaacggacaaggccacaacaugcccaacgauccuaaccgcaacguagacgaaaacgccaacgcaaacagcgcagucaaaaacaacaacaacgaggaaccaucagacaaacacaucaaagaauaccucaacaaaauccaaaacucccuauccacagaauggucacccugcuccguaaccugcggcaacggcauccaaguacgcaucaaacccggauccgcaaacaaaccaaaagaugaauuagauuaugcaaacgacauagaaaagaaaauaugcaaaauggaaaaaugcuccuccguauucaacguagucaacuccucuucagggggacucuccaaagacaucaucaaacuucucaacgaacaagucaacaaagagaugaacagcuccaaccucuacaugucaaugucaagcuggugcuacacacacucacuggacggcgccggccucuuccuauucgaccacgccgcagaagaauacgaacacgccaagaaacuuauaaucuuccuaaacgaaaauaacguaccuguccaacucacaucaaucucggccccagaacauaaauucgaagggcucacgcaaauauuucaaaaagcauacgaacacgaacagcacaucuccgaaucaaucaacaacauugucgaccacgcaaucaaauccaaagaccacgccacauucaacuuccuacaaugguacguggccgaacaacacgaagaagaaguccucuucaaagacauacuagacaaaaucgaacuaaucggcaacgaaaaccacggccucuaccuagccgaccaauacguaaaaggaaucgcgaaaucccgcaaauccuaaggacuagucccuguucccagagcccacuuuuuuuucuuuuuuugaaauaaaauagccugucuuucagaucucaaaggcucuuuucagagccaccaaaaaaaaaaaaaaaaaaaaaaaaaaaaaaaaaaaaaaaaaaaaaaaaaaaaaaaaaaaaaaaaaaaaaaaaaaaaaaaaaaaaaaaaaaaaaaaaaaaaa

SEQ ID NO: 9869 - RNA, 1895 nt, Artificial Sequence
  mRNA Design a-1 (hSL-A100) comprising derived and/or modified sequence from Pf(3D7)__XP_001351122.1__HsALB_Pf-CSP(93-384)_L(PVTN)_HBsAg (opt11)
aggagagucccgcagucggcguccagcggcucugcuuguucgugugugugucguugcaggccuuauucaagcuuaccaugaaaugggucaccuuuaucucacuccuauuucucuucucuuccgcauacuccaaacucaaacaacccgcagacggaaaccccgacccaaacgcaaaccccaacguagaccccaacgccaaccccaacgucgaccccaacgccaaccccaacguagaccccaacgcaaaccccaacgccaacccaaacgccaaccccaacgccaaccccaacgccaaucccaacgccaacccaaacgcaaaucccaacgcaaaccccaacgccaaccccaacgccaacccaaacgccaauccaaacgcaaacccuaacgccaacccuaacgcgaaccccaacgccaaccccaacgcaaaccccaacgccaaccccaaugucgaccccaacgccaaccccaacgccaaccccaacgcaaaccccaacgcaaacccaaacgccaaucccaacgccaaccccaacgcaaacccuaacgccaaccccaaugccaauccuaacgccaaccccaacgccaacccuaacgccaacccaaacgccaaccccaacgccaaccccaacgccaacccuaacgccaacccuaacgccaacccaaacgccaauccaaacaagaacaaccaaggcaacggucaaggccacaauaugccaaacgacccaaaccgaaacguagacgaaaacgccaacgccaacuccgccgucaaaaacaacaacaacgaagaacccuccgacaaacacaucaaagaauaucugaacaaaauccaaaacucccucuccaccgaauggucccccugcuccgucacuuguggcaauggcauacaaguccgcaucaaacccggcucagccaacaaacccaaagacgaacucgacuacgcaaacgacaucgaaaagaaaauaugcaaaauggaaaaaugcuccucugucuucaacgucgucaacuccucgcccguaaccaacauggaaaacaucaccucaggauuccucggcccccuacucguccuccaagccggcuucuuccuccucacccgaauccuuacaaucccccaaucccuugacucaugguggaccucccuuaauuuccucggcgguucccccgucugccuuggccaaaacucacaaucccccaccucaaaccacucccccacuuccugcccgcccauaugccccggcuaccgcuggaugugccuccgccgguucaucauauuccucuucauccuacuccucugccuuauauuucuauuaguccuccuagacuaccaaggaaugcuccccguaugcccacuaauccccggauccaccaccaccaacaccggccccugcaaaaccugcaccaccccugcacaaggaaacuccauguucccaucuuguugcugcacaaaaccaaccgacggcaacuguaccugcauccccaucccuucaucaugggccuucgccaaauaccuaugggaaugggccucaguacguuucuccuggcuaucccuccucgucccauucguucaaugguucgucggccuaucccccacgguauggcucuccgcaauauggaugaugugguacuggggccccucacuauacaguauaguuucccccuucauaccccuccuccccauauucuucugccucuggguauacaucuagggacuagucccuguucccagagcccacuuuuuuuucuuuuuuugaaauaaaauagccugucuuucagaucucaaaggcucuuuucagagccaccaaaaaaaaaaaaaaaaaaaaaaaaaaaaaaaaaaaaaaaaaaaaaaaaaaaaaaaaaaaaaaaaaaaaaaaaaaaaaaaaaaaaaaaaaaaaaaaaaaaaa

SEQ ID NO: 9870 - RNA, 1556 nt, Artificial Sequence
  mRNA Design a-1 (hSL-A100) comprising derived and/or modified sequence from Pf(3D7)__XP_001351122.1__HsALB_Pf-CSP(199-377)_L(PVTN)_HBsAg (opt11)
aggagagucccgcagucggcguccagcggcucugcuuguucgugugugugucguugcaggccuuauucaagcuuaccaugaaauggguaaccuucaucucccuccuauucuuauucucaucagccuacuccgacccaaacgcaaaccccaaugccaaccccaacgccaaccccaacgccaaucccaacgccaaccccaacgccaaucccaaugcuaaccccaacgccaacccaaacgccaacccaaacgcaaaccccaacgccaaccccaacgccaaccccaacgccaacccaaacgccaaccccaacgcaaaccccaacgccaacccaaacgccaaccccaacgccaacccaaacaaaaacaaucaaggcaacggccaaggacacaacaugcccaacgaccccaaccgcaacgucgacgaaaacgcaaacgccaacucugcagucaaaaacaacaacaacgaagaacccuccgacaaacacauaaaagaauaccucaacaaaauccaaaacucccucuccacagaaugguccccaugcuccgucacgugcggcaacggcauccaaguacgcaucaaacccggcucugccaacaaaccuaaagacgaacucgacuacgccaacgacaucgaaaagaaaaucugcaaaauggaaaaaugcuccucaguccccguaacuaacauggaaaacaucacguccggcuuccucggcccccuccuaguccuccaagccggcuucuuccuacucacacgcauucuuaccaucccgcaaucacucgacuccugguggaccucccucaacuucuuaggcggcuccccugucugccucggccaaaacucacaaucccccacuucaaaccacucacccaccagcugcccacccauaugcccaggauaccgcuggaugugccuccgccguuucauaaucuuccucuucauacuccuacucugccuaaucuuccuccucguacuccuagacuaccaaggcaugcuccccgucugcccacucauccccggaagcacuacaaccaacaccggccccugcaaaacaugcaccacccccgcacaaggcaacuccauguuccccuccugcugcugcacaaaacccacugauggcaacugcacuugcauccccauccccuccucaugggccuucgccaaauaucucugggaaugggccagcguccgguucucuuggcucucacuccuaguccccuucguucaaugguucguaggccuaucccccaccgucuggcucuccgcaauauggaugaugugguauuggggccccucccucuacuccauuguaucccccuucaucccacuacuccccaucuucuucugccuuugggucuacauauaaggacuagucccuguucccagagcccacuuuuuuuucuuuuuuugaaauaaaauagccugucuuucagaucucaaaggcucuuuucagagccaccaaaaaaaaaaaaaaaaaaaaaaaaaaaaaaaaaaaaaaaaaaaaaaaaaaaaaaaaaaaaaaaaaaaaaaaaaaaaaaaaaaaaaaaaaaaaaaaaaaaaa

SEQ ID NO: 9871 - RNA, 1253 nt, Artificial Sequence
  mRNA Design a-1 (hSL-A100) comprising derived and/or modified sequence from Pf(3D7)__XP_001351122.1__HsALB_Pf-CSP(19-272)_L(AAY)_Pf-CSP(346-3 75)_L(AAY)_Pf-CSP(310-327) (opt11)
aggagagucccgcagucggcguccagcggcucugcuuguucgugugugugucguugcaggccuuauucaagcuuaccaugaaauggguaaccuucaucucacuccuauuccuguucuccagugcauacucacucuuccaagaauaccaaugcuacggcuccagcagcaacacgcgaguccucaacgaacuaaacuacgauaacgccggaaccaaccuuuacaacgaacucgaaaugaacuacuacggcaaacaagaaaacugguacucacuaaaaaaaaacagcagaucacuaggcgaaaacgacgacggaaacaacgaagacaacgaaaaacuacgcaagcccaaacacaagaaacucaaacaacccgcagacggaaacccagaccccaacgcaaaccccaacguagaccccaacgcaaaccccaacguagaccccaacgcaaaucccaacguagacccaaacgcaaaccccaacgcaaacccaaacgcaaacccaaacgcgaacccaaacgcaaacccaaacgcaaacccgaacgccaacccaaacgcaaacccaaacgcuaaccccaacgcaaacccaaacgcaaacccaaacgcaaacccaaacgcaaacccaaacgcaaacccaaacgcaaacccgaacgcaaacccaaacgcaaaccccaacguagacccaaacgccaacccaaacgcaaaccccaacgccaacccaaacgcaaacccaaacgcaaacccaaacgcaaacccaaacgcaaacccaaacgcaaacccaaacgcaaaccccaacgcgaacccaaacgccaacccaaacgcaaacccaaacgcgaacccaaacgccaaccccaacgcaaaccccaacgcaaaccccaacgcaaacccaaacgcaaaccccgccgcuuacauaaaacccggcucggccaauaaaccaaaagacgaacucgacuacgccaacgacauagaaaaaaaaauaugcaaaauggaaaaaugcagcgccgccuacgaaccaucagacaaacacaucaaagaauaccucaacaaaauacaaaacagccucuaaggacuagucccuguucccagagcccacuuuuuuuucuuuuuuugaaauaaaauagccugucuuucagaucucaaaggcucuuuucagagccaccaaaaaaaaaaaaaaaaaaaaaaaaaaaaaaaaaaaaaaaaaaaaaaaaaaaaaaaaaaaaaaaaaaaaaaaaaaaaaaaaaaaaaaaaaaaaaaaaaaaaa

SEQ ID NO: 9872 - RNA, 1301 nt, Artificial Sequence
  mRNA Design a-1 (hSL-A100) comprising derived and/or modified sequence from Pf(3D7)__XP_001351122.1__HsALB_Pf-CSP(19-272)_L(AAY)_Pf-CSP(346-3 75)_L(AAY)_Pf-CSP(310-327)_L(AAY)_PADRE (opt11)
aggagagucccgcagucggcguccagcggcucugcuuguucgugugugugucguugcaggccuuauucaagcuuaccaugaaauggguaacauuuaucucccuccucuuccucuuuuccuccgcauacucacucuuccaagaauaccaaugcuacggaucaagcuccaacacccgcguccuuaacgaacuuaacuacgacaacgccggcaccaacuuauacaacgaacucgagaugaacuacuacggcaaacaagaaaacugguacucccucaaaaaaaacuccagaucccucggcgaaaacgacgacggaaacaacgaagacaacgaaaaacuccgcaaacccaaacacaaaaaacucaaacaacccgcugacggcaacccugaccccaacgccaaccccaacguagaccccaacgccaaucccaacguagacccaaacgccaaccccaacguagaccccaacgccaaccccaacgcaaacccaaacgccaaccccaacgccaaccccaacgcgaacccaaacgccaaccccaacgccaacccuaacgccaacccgaacgccaaccccaacgccaaccccaacgccaaccccaacgcgaaccccaacgcaaaccccaacgccaaccccaacgcaaaccccaacgccaaccccaacgccaaccccaacguagaccccaacgccaacccaaacgccaacccaaacgcaaaccccaacgccaauccaaacgcaaaccccaacgcaaaccccaaugccaacccaaacgccaaccccaacgccaacccaaacgccaacccaaacgccaaccccaacgcaaacccaaacgcaaaccccaacgcaaacccuaacgccaacccaaacgccaacccaaacgcaaaccccaacgcaaaccccgccgccuacaucaaaccaggcuccgccaauaaaccaaaagacgaacucgacuacgcaaaugacauagaaaaaaaaauaugcaaaauggaaaaaugcuccgcagccuacgaacccagcgacaaacauaucaaagaauacuuaaacaaaauccaaaacucccuagccgccuacgccaaauucgucgcagccuggacccucaaagccgccgccuaaggacuagucccuguucccagagcccacuuuuuuuucuuuuuuugaaauaaaauagccugucuuucagaucucaaaggcucuuuucagagccaccaaaaaaaaaaaaaaaaaaaaaaaaaaaaaaaaaaaaaaaaaaaaaaaaaaaaaaaaaaaaaaaaaaaaaaaaaaaaaaaaaaaaaaaaaaaaaaaaaaaaa

SEQ ID NO: 9873 - RNA, 1301 nt, Artificial Sequence
  mRNA Design a-1 (hSL-A100) comprising derived and/or modified sequence from Pf(3D7)__XP_001351122.1__HsALB_Pf-CSP(19-272)_L(AAY)_Pf-CSP(310-3 27)_L(AAY)_Pf-CSP(346-375)_L(AAY)_PADRE (opt11)
aggagagucccgcagucggcguccagcggcucugcuuguucgugugugugucguugcaggccuuauucaagcuuaccaugaaaugggugaccuuuaucucacuccucuuccucuucucaagcgcauacucacucuuccaagaauaccaaugcuacgguucaagcucaaacacaagaguccucaacgaacucaacuacgacaacgccggaaccaaccucuacaacgaacucgaaaugaacuacuacggcaaacaagaaaacugguacucacucaaaaaaaacagcaggucccuaggcgaaaacgacgacggaaacaacgaagacaacgaaaaacuccgcaaaccaaaacacaaaaaacugaaacaacccgcagacggaaacccagaccccaacgcaaacccgaacgucgacccgaacgccaacccaaacguagacccaaacgcaaaccccaacgucgacccaaacgcaaacccaaacgcaaacccaaacgcaaacccgaacgcaaacccaaacgcgaacccaaacgcaaacccaaacgcaaacccaaacgccaacccaaacgcaaacccaaaugcaaaccccaacgcaaacccgaacgcaaacccaaacgcaaaccccaacgcaaacccaaacgcuaacccaaacgcgaaccccaacgcaaacccaaacguggacccaaacgcaaacccaaacgcaaacccaaacgcgaacccgaacgcaaacccaaacgcgaacccaaacgcaaaccccaacgcaaacccaaacgcaaacccaaacgccaacccaaacgcaaacccaaacgcgaaccccaacgccaacccaaacgcaaacccaaacgcaaacccaaacgcaaacccaaacgcaaacccaaacgccaacccaaacgcaaacccagcugccuacgaacccuccgacaaacacaucaaagaguaccugaacaaaauccaaaacucccucgcagccuacaucaagcccggauccgcaaacaaacccaaagacgaacucgacuacgccaacgacauagaaaaaaaaaucugcaaaauggaaaaaugcucagccgcauacgcaaaauucguagcagccuggacccuaaaagcggcagcauaaggacuagucccuguucccagagcccacuuuuuuuucuuuuuuugaaauaaaauagccugucuuucagaucucaaaggcucuuuucagagccaccaaaaaaaaaaaaaaaaaaaaaaaaaaaaaaaaaaaaaaaaaaaaaaaaaaaaaaaaaaaaaaaaaaaaaaaaaaaaaaaaaaaaaaaaaaaaaaaaaaaaa

SEQ ID NO: 9874 - RNA, 1355 nt, Artificial Sequence
  mRNA Design a-1 (hSL-A100) comprising derived and/or modified sequence from Pf(3D7)__XP_001351122.1__HsALB_Pf-CSP(19-272)_L(AAY)_Pf-CSP(310-3 27)_L(AAY)_Pf-CSP(346-375)_L(AAY)_PADRE_L(AAY)_P2 (opt11)
aggagagucccgcagucggcguccagcggcucugcuuguucgugugugugucguugcaggccuuauucaagcuuaccaugaaaugggugaccuucauaucacuauuauuccucuucucaagcgcauacucacucuuccaagaauaccaaugcuacggcuccuccucaaacacgcgcguacucaacgaacuaaacuacgacaacgccggaacaaaccucuacaacgaacuagaaaugaacuacuacggcaaacaagaaaacugguacucccuaaaaaaaaacucaagaucccuaggcgagaaugacgacggcaacaacgaagacaacgaaaaacuccgcaaacccaaacacaaaaaacucaaacaacccgccgacggaaacccagacccaaacgccaacccaaacgucgacccaaacgcaaaccccaacguagaccccaacgcaaacccaaacguagacccaaacgcaaacccaaacgcaaacccaaacgcaaaccccaacgccaacccaaacgcaaacccaaacgccaauccaaacgcaaacccaaaugccaacccaaacgcaaacccaaacgcaaacccaaacgccaaccccaacgcaaacccaaacgcaaacccaaacgccaacccaaacgcaaacccaaacgcaaaccccaacgccaacccgaacguagaccccaacgcaaaccccaacgcaaacccaaacgccaauccaaacgcaaaccccaacgcaaaccccaacgcaaaccccaacgccaauccaaacgccaaccccaacgcgaacccgaacgcaaacccaaacgcaaacccaaacgcaaacccaaacgcaaacccaaacgcaaacccaaacgcaaacccgaacgcaaaccccaacgccaacccaaacgcaaacccagccgcauacgaacccucagacaaacacauaaaagaauaccuaaacaaaauccaaaacucacucgcugccuacaucaaaccaggaagcgcaaacaaacccaaagacgaacucgauuacgccaacgacaucgaaaaaaaaaucugcaaaauggaaaaaugcuccgccgccuacgcaaaauucgucgcagccuggacucuaaaagccgccgcagccgcauaccaauacauaaaagccaacucaaaauucaucggaaucaccgaacuguaaggacuagucccuguucccagagcccacuuuuuuuucuuuuuuugaaauaaaauagccugucuuucagaucucaaaggcucuuuucagagccaccaaaaaaaaaaaaaaaaaaaaaaaaaaaaaaaaaaaaaaaaaaaaaaaaaaaaaaaaaaaaaaaaaaaaaaaaaaaaaaaaaaaaaaaaaaaaaaaaaaaaa

SEQ ID NO: 9875 - RNA, 1319 nt, Artificial Sequence
  mRNA Design a-1 (hSL-A100) comprising derived and/or modified sequence from Pf(3D7)__XP_001351122.1__HsALB_Pf-CSP(19-272)_L(AAY)_Pf-CSP(310-3 27)_Linker (AAY)_Pf-CSP(346-397) (opt11)
aggagagucccgcagucggcguccagcggcucugcuuguucgugugugugucguugcaggccuuauucaagcuuaccaugaaaugggucaccuucaucucacuccuguuccuauucucgagcgcauacucccucuuccaagaauaccagugcuacggcucaagcucaaacacacgcguacucaacgaacuaaacuacgacaacgccggaaccaaccucuacaacgaacuagaaaugaacuacuacggcaaacaagagaacugguacucucuaaagaaaaacagcagaucccugggcgagaacgacgacggaaacaacgaagacaacgagaaacuacgcaaacccaaacacaagaaacuaaaacaacccgcagauggaaacccagauccaaacgcaaacccaaacgucgacccuaacgcaaaccccaacguagaccccaacgcaaaccccaacguagacccaaacgccaacccaaacgccaacccaaacgccaacccgaacgcaaaccccaaugccaacccaaacgccaacccgaacgccaacccaaacgcgaaccccaacgccaacccaaacgcaaacccaaacgcaaacccuaacgcaaaccccaacgccaacccaaaugccaacccaaacgcaaacccaaacgcaaacccaaacgccaaccccaacguagacccaaacgcaaaccccaacgcaaacccaaacgcaaacccaaacgccaacccaaacgcaaacccaaacgcaaacccaaacgcaaacccgaacgccaaccccaacgcaaacccaaacgcaaacccaaacgccaacccaaacgccaacccaaacgcaaaccccaacgcaaaccccaacgccaaccccaacgccaacccaaacgcaaacccaaacgcaaacccagccgcauacgaacccucagacaaacacauaaaagaauaccucaauaaaauccaaaacucacuugcagccuacauaaaaccaggcagcgcgaacaaacccaaagacgaacucgacuacgcgaacgacauagaaaagaaaaucugcaaaauggaaaaaugcucauccgucuucaaugucguaaacucauccauaggccuaaucaugguccucuccuuccuauuccucaacuaaggacuagucccuguucccagagcccacuuuuuuuucuuuuuuugaaauaaaauagccugucuuucagaucucaaaggcucuuuucagagccaccaaaaaaaaaaaaaaaaaaaaaaaaaaaaaaaaaaaaaaaaaaaaaaaaaaaaaaaaaaaaaaaaaaaaaaaaaaaaaaaaaaaaaaaaaaaaaaaaaaaaa

SEQ ID NO: 9876 - RNA, 2016 nt, Artificial Sequence
  mRNA Design a-3 (hSL-A100) comprising derived and/or modified sequence from Pf(3D7)__XP_001351122.1__LumSynt_L(GGS4-GGG)_Pf-CSP(19-397) (opt1)
aggagagggcgcuuggcuugcaaggacccugagcugcggcauugaagcacacccaacccaacucgacugaagucagccucacugaaccggaucugagaaucuucucucucugggcuugccagggcucuccgaaccuagcuagcauccucuucaauuccaacuagaaagcuuaccaugcagaucuacgagggcaagcugaccgccgaggggcuccgcuucggcaucguggccagccgguucaaccacgcgcuggucgaccgccugguggagggggccaucgacgccaucgugcggcacggcgggcgcgaggaggacaucacccucguccgggugcccggcuccugggagaucccgguggccgccggcgagcuggcccgcaaggaggacaucgacgcggucaucgccaucggggugcugauccggggcgccacgccccacuucgacuacaucgccagcgagguguccaaggggcucgcggaccugagccuggagcuccgcaagcccaucaccuucggcgucaucaccgccgacacccuggagcaggccaucgagcgggccgggacgaagcacggcaacaagggcugggaggccgcgcuguccgccaucgagauggccaaccucuucaagagccugcgcggcgggagcggcggguccggcgggagcggcggcuccgggggcgggcuguuccaggaguaccagugcuacggcuccagcuccaacacccgggugcucaacgagcugaacuacgacaacgcggggaccaaccuguacaacgagcucgagaugaacuacuacggcaagcaggagaacugguacagccugaagaagaacucccgcagccugggggagaacgacgacggcaacaacgaggacaacgagaagcuccggaagcccaagcacaagaagcugaagcagccggccgacgggaaccccgaccccaacgccaaccccaacguggacccgaacgccaaccccaacgucgaccccaacgccaaccccaacguggacccgaacgcgaaccccaacgccaaccccaacgccaaccccaacgccaacccgaacgcgaaccccaacgccaaccccaacgccaaccccaacgccaacccgaacgccaaccccaacgcgaaccccaacgccaaccccaacgccaacccgaacgccaaccccaacgccaaccccaacgcgaaccccaacgccaacccgaacgccaaccccaacguggaccccaacgccaaccccaacgccaacccgaacgcgaaccccaacgccaaccccaacgccaacccgaacgccaaccccaacgccaaccccaacgcgaaccccaacgccaacccgaacgccaaccccaacgccaaccccaacgcgaaccccaacgccaacccgaacgccaaccccaacgccaaccccaacgccaaccccaacgcgaacccgaacgccaaccccaacaagaacaaccagggcaacggccaggggcacaacaugcccaacgaccccaaccgcaacgucgacgagaacgccaacgccaacuccgccgugaagaacaacaacaacgaggagccgagcgacaagcacaucaaggaguaccugaacaagauccagaacucccucagcacggaguggucccccugcagcgugaccugcggcaacgggauccagguccggaucaagcccggcuccgcgaacaagcccaaggacgagcuggacuacgccaacgacaucgagaagaagaucugcaagauggagaagugcagcuccguguucaacguggucaacagcuccaucgggcugaucauggugcucagcuuccuguuccugaacugaggacuagucccuguucccagagcccacuuuuuuuucuuuuuuugaaauaaaauagccugucuuucagaucucaaaggcucuuuucagagccaccaaaaaaaaaaaaaaaaaaaaaaaaaaaaaaaaaaaaaaaaaaaaaaaaaaaaaaaaaaaaaaaaaaaaaaaaaaaaaaaaaaaaaaaaaaaaaaaaaaaaa

SEQ ID NO: 9877 - RNA, 1563 nt, Artificial Sequence; identical to SEQ ID NO: 8262
  mRNA Design a-3 (hSL-A100) comprising derived and/or modified sequence from Pf(3D7)__XP_001351122.1__HsALB_Pf-CSP(19-397) (opt1)

SEQ ID NO: 9878 - RNA, 1878 nt, Artificial Sequence
  mRNA Design a-3 (hSL-A100) comprising derived and/or modified sequence from Pf(3D7)__XP_001351122.1__HsALB_Pf-CSP(19-272)_L(PVTN)_HBsAg (opt1)
aggagagggcgcuuggcuugcaaggacccugagcugcggcauugaagcacacccaacccaacucgacugaagucagccucacugaaccggaucugagaaucuucucucucugggcuugccagggcucuccgaaccuagcuagcauccucuucaauuccaacuagaaagcuuaccaugaagugggugaccuucaucagccugcucuuccuguucuccagcgccuacucccuguuccaggaguaccagugcuacggcuccagcuccaacacccgggugcucaacgagcugaacuacgacaacgcggggaccaaccuguacaacgagcucgagaugaacuacuacggcaagcaggagaacugguacagccugaagaagaacucccgcagccugggggagaacgacgacggcaacaacgaggacaacgagaagcuccggaagcccaagcacaagaagcugaagcagccggccgacgggaaccccgaccccaacgccaaccccaacguggacccgaacgccaaccccaacgucgaccccaacgccaaccccaacguggacccgaacgcgaaccccaacgccaaccccaacgccaaccccaacgccaacccgaacgcgaaccccaacgccaaccccaacgccaaccccaacgccaacccgaacgccaaccccaacgcgaaccccaacgccaaccccaacgccaacccgaacgccaaccccaacgccaaccccaacgcgaaccccaacgccaacccgaacgccaaccccaacguggaccccaacgccaaccccaacgccaacccgaacgcgaaccccaacgccaaccccaacgccaacccgaacgccaaccccaacgccaaccccaacgcgaaccccaacgccaacccgaacgccaaccccaacgccaaccccaacgcgaaccccaacgccaacccgaacgccaaccccaacgccaaccccaacgccaaccccaacgcgaacccgaacgccaaccccccggugacgaacauggagaacaucaccagcggcuuccuggggccccuccuggugcugcaggccggcuucuuccuccugacccgcauccugaccaucccgcagucccucgacagcugguggaccucccugaacuuccucgggggcagccccgucugccuggggcagaacucccagagccccaccuccaaccacagccccaccuccugcccgcccaucugccccggcuaccgguggaugugccugcgccgguucaucaucuuccuguucauccuccugcugugccucaucuuccugcuggugcuccuggacuaccagggcaugcugcccgugugcccgcucauccccgggagcacgaccaccaacaccggccccugcaagacgugcaccacccccgcccaggggaacuccauguucccgagcugcugcugcaccaagcccacggacggcaacugcacgugcauccccauccccuccagcugggcguucgccaaguaccugugggagugggccuccguccgcuucagcuggcugucccuccuggugccguucgugcagugguucgucgggcugagccccaccguguggcucuccgccaucuggaugaugugguacuggggccccagccuguacagcaucgugucccccuucaucccgcugcuccccaucuucuucugccugugggucuacaucugaggacuagucccuguucccagagcccacuuuuuuuucuuuuuuugaaauaaaauagccugucuuucagaucucaaaggcucuuuucagagccaccaaaaaaaaaaaaaaaaaaaaaaaaaaaaaaaaaaaaaaaaaaaaaaaaaaaaaaaaaaaaaaaaaaaaaaaaaaaaaaaaaaaaaaaaaaaaaaaaaaaaa

SEQ ID NO: 9879 - RNA, 1995 nt, Artificial Sequence
  mRNA Design a-3 (hSL-A100) comprising derived and/or modified sequence from Pf(3D7)__XP_001351122.1__HsALB_Pf-CSP(19-272)_L(AAY)_Pf-CSP(346-3 65)_L(AAY)_PADRE_L(PVTN)_HBsAg (opt1)
aggagagggcgcuuggcuugcaaggacccugagcugcggcauugaagcacacccaacccaacucgacugaagucagccucacugaaccggaucugagaaucuucucucucugggcuugccagggcucuccgaaccuagcuagcauccucuucaauuccaacuagaaagcuuaccaugaagugggugaccuucaucagccugcucuuccuguucuccagcgccuacucccuguuccaggaguaccagugcuacggcuccagcuccaacacccgggugcucaacgagcugaacuacgacaacgcggggaccaaccuguacaacgagcucgagaugaacuacuacggcaagcaggagaacugguacagccugaagaagaacucccgcagccugggggagaacgacgacggcaacaacgaggacaacgagaagcuccggaagcccaagcacaagaagcugaagcagccggccgacgggaaccccgaccccaacgccaaccccaacguggacccgaacgccaaccccaacgucgaccccaacgccaaccccaacguggacccgaacgcgaaccccaacgccaaccccaacgccaaccccaacgccaacccgaacgcgaaccccaacgccaaccccaacgccaaccccaacgccaacccgaacgccaaccccaacgcgaaccccaacgccaaccccaacgccaacccgaacgccaaccccaacgccaaccccaacgcgaaccccaacgccaacccgaacgccaaccccaacguggaccccaacgccaaccccaacgccaacccgaacgcgaaccccaacgccaaccccaacgccaacccgaacgccaaccccaacgccaaccccaacgcgaaccccaacgccaacccgaacgccaaccccaacgccaaccccaacgcgaaccccaacgccaacccgaacgccaaccccaacgccaaccccaacgccaaccccaacgcgaacccgaacgccaaccccgccgcguauaucaagcccggcuccgcgaacaagcccaaggacgagcuggacuacgccaacgacaucgaggcggccuacgccaaguucguggccgccuggacccugaaggcggccgccccggugacgaacauggagaacaucaccagcggcuuccuggggccccuccuggugcugcaggccggcuucuuccuccugacccgcauccugaccaucccgcagucccucgacagcugguggaccucccugaacuuccucgggggcagccccgucugccuggggcagaacucccagagccccaccuccaaccacagccccaccuccugcccgcccaucugccccggcuaccgguggaugugccugcgccgguucaucaucuuccuguucauccuccugcugugccucaucuuccugcuggugcuccuggacuaccagggcaugcugcccgugugcccgcucauccccgggagcacgaccaccaacaccggccccugcaagacgugcaccacccccgcccaggggaacuccauguucccgagcugcugcugcaccaagcccacggacggcaacugcacgugcauccccauccccuccagcugggcguucgccaaguaccugugggagugggccuccguccgcuucagcuggcugucccuccuggugccguucgugcagugguucgucgggcugagccccaccguguggcucuccgccaucuggaugaugugguacuggggccccagccuguacagcaucgugucccccuucaucccgcugcuccccaucuucuucugccugugggucuacaucugaggacuagucccuguucccagagcccacuuuuuuuucuuuuuuugaaauaaaauagccugucuuucagaucucaaaggcucuuuucagagccaccaaaaaaaaaaaaaaaaaaaaaaaaaaaaaaaaaaaaaaaaaaaaaaaaaaaaaaaaaaaaaaaaaaaaaaaaaaaaaaaaaaaaaaaaaaaaaaaaaaaaa

SEQ ID NO: 9880 - RNA, 1995 nt, Artificial Sequence
  mRNA Design a-3 (hSL-A100) comprising derived and/or modified sequence from Pf(3D7)__XP_001351122.1__HsALB_Pf-CSP(19-272)_L(AAY)_Pf-CSP(346-3 65)_L(AAY)_PADRE_L(PVTN)_HBsAg (opt1)
aggagagggcgcuuggcuugcaaggacccugagcugcggcauugaagcacacccaacccaacucgacugaagucagccucacugaaccggaucugagaaucuucucucucugggcuugccagggcucuccgaaccuagcuagcauccucuucaauuccaacuagaaagcuuaccaugaagugggugaccuucaucagccuccuguuccuguucuccagcgccuacucccuguuccaggaguaccagugcuacggcuccagcuccaacacccgggugcucaacgagcugaacuacgacaacgcggggaccaaccuguacaacgagcucgagaugaacuacuacggcaagcaggagaacugguacagccugaagaagaacucccgcagccugggggagaacgacgacggcaacaacgaggacaacgagaagcuccggaagcccaagcacaagaagcugaagcagccggccgacgggaaccccgaccccaacgccaaccccaacguggacccgaacgccaaccccaacgucgaccccaacgccaaccccaacguggacccgaacgcgaaccccaacgccaaccccaacgccaaccccaacgccaacccgaacgcgaaccccaacgccaaccccaacgccaaccccaacgccaacccgaacgccaaccccaacgcgaaccccaacgccaaccccaacgccaacccgaacgccaaccccaacgccaaccccaacgcgaaccccaacgccaacccgaacgccaaccccaacguggaccccaacgccaaccccaacgccaacccgaacgcgaaccccaacgccaaccccaacgccaacccgaacgccaaccccaacgccaaccccaacgcgaaccccaacgccaacccgaacgccaaccccaacgccaaccccaacgcgaaccccaacgccaacccgaacgccaaccccaacgccaaccccaacgccaaccccaacgcgaacccgaacgccaaccccgccgcguauaucaagcccggcuccgcgaacaagcccaaggacgagcuggacuacgccaacgacaucgaggcggccuacgccaaguucguggccgccuggacccugaaggcggccgccccggugacgaacauggagaacaucaccagcggcuuccuggggccccuccuggugcugcaggccggcuucuuccuccugacccgcauccugaccaucccgcagucccucgacagcugguggaccucccugaacuuccucgggggcagccccgucugccuggggcagaacucccagagccccaccuccaaccacagccccaccuccugcccgcccaucugccccggcuaccgguggaugugccugcgccgguucaucaucuuccuguucauccuccugcugugccucaucuuccugcuggugcuccuggacuaccagggcaugcugcccgugugcccgcucauccccgggagcacgaccaccaacaccggccccugcaagacgugcaccacccccgcccaggggaacuccauguucccgagcugcugcugcaccaagcccacggacggcaacugcacgugcauccccauccccuccagcugggcguucgccaaguaccugugggagugggccuccguccgcuucagcuggcugucccuccuggugccguucgugcagugguucgucgggcugagccccaccguguggcucuccgccaucuggaugaugugguacuggggccccagccuguacagcaucgugucccccuucaucccgcugcuccccaucuucuucugccugugggucuacaucugaggacuagucccuguucccagagcccacuuuuuuuucuuuuuuugaaauaaaauagccugucuuucagaucucaaaggcucuuuucagagccaccaaaaaaaaaaaaaaaaaaaaaaaaaaaaaaaaaaaaaaaaaaaaaaaaaaaaaaaaaaaaaaaaaaaaaaaaaaaaaaaaaaaaaaaaaaaaaaaaaaaaa

SEQ ID NO: 9881 - RNA, 2214 nt, Artificial Sequence
  mRNA Design a-3 (hSL-A100) comprising derived and/or modified sequence from Pf(3D7)__XP_001351122.1__HsALB_Pf-CSP(19-384)_L(PVTN)_HBsAg (opt1)
aggagagggcgcuuggcuugcaaggacccugagcugcggcauugaagcacacccaacccaacucgacugaagucagccucacugaaccggaucugagaaucuucucucucugggcuugccagggcucuccgaaccuagcuagcauccucuucaauuccaacuagaaagcuuaccaugaagugggugaccuucaucagccugcucuuccuguucuccagcgccuacucccuguuccaggaguaccagugcuacggcuccagcuccaacacccgggugcucaacgagcugaacuacgacaacgcggggaccaaccuguacaacgagcucgagaugaacuacuacggcaagcaggagaacugguacagccugaagaagaacucccgcagccugggggagaacgacgacggcaacaacgaggacaacgagaagcuccggaagcccaagcacaagaagcugaagcagccggccgacgggaaccccgaccccaacgccaaccccaacguggacccgaacgccaaccccaacgucgaccccaacgccaaccccaacguggacccgaacgcgaaccccaacgccaaccccaacgccaaccccaacgccaacccgaacgcgaaccccaacgccaaccccaacgccaaccccaacgccaacccgaacgccaaccccaacgcgaaccccaacgccaaccccaacgccaacccgaacgccaaccccaacgccaaccccaacgcgaaccccaacgccaacccgaacgccaaccccaacguggaccccaacgccaaccccaacgccaacccgaacgcgaaccccaacgccaaccccaacgccaacccgaacgccaaccccaacgccaaccccaacgcgaaccccaacgccaacccgaacgccaaccccaacgccaaccccaacgcgaaccccaacgccaacccgaacgccaaccccaacgccaaccccaacgccaaccccaacgcgaacccgaacgccaaccccaacaagaacaaccagggcaacggccaggggcacaacaugcccaacgaccccaaccgcaacgucgacgagaacgccaacgccaacuccgccgugaagaacaacaacaacgaggagccgagcgacaagcacaucaaggaguaccugaacaagauccagaacucccucagcacggaguggucccccugcagcgugaccugcggcaacgggauccagguccggaucaagcccggcuccgcgaacaagcccaaggacgagcuggacuacgccaacgacaucgagaagaagaucugcaagauggagaagugcagcuccguguucaacguggucaacagcuccccggugacgaacauggagaacaucaccagcggcuuccuggggccccuccuggugcugcaggccggcuucuuccuccugacccgcauccugaccaucccgcagucccucgacagcugguggaccucccugaacuuccucgggggcagccccgucugccuggggcagaacucccagagccccaccuccaaccacagccccaccuccugcccgcccaucugccccggcuaccgguggaugugccugcgccgguucaucaucuuccuguucauccuccugcugugccucaucuuccugcuggugcuccuggacuaccagggcaugcugcccgugugcccgcucauccccgggagcacgaccaccaacaccggccccugcaagacgugcaccacccccgcccaggggaacuccauguucccgagcugcugcugcaccaagcccacggacggcaacugcacgugcauccccauccccuccagcugggcguucgccaaguaccugugggagugggccuccguccgcuucagcuggcugucccuccuggugccguucgugcagugguucgucgggcugagccccaccguguggcucuccgccaucuggaugaugugguacuggggccccagccuguacagcaucgugucccccuucaucccgcugcuccccaucuucuucugccugugggucuacaucugaggacuagucccuguucccagagcccacuuuuuuuucuuuuuuugaaauaaaauagccugucuuucagaucucaaaggcucuuuucagagccaccaaaaaaaaaaaaaaaaaaaaaaaaaaaaaaaaaaaaaaaaaaaaaaaaaaaaaaaaaaaaaaaaaaaaaaaaaaaaaaaaaaaaaaaaaaaaaaaaaaaaa

SEQ ID NO: 9882 - RNA, 2214 nt, Artificial Sequence
  mRNA Design a-3 (hSL-A100) comprising derived and/or modified sequence from Pf(3D7)__XP_001351122.1__HsALB_Pf-CSP(19-384)_L(PVTN)_HBsAg (opt1)
aggagagggcgcuuggcuugcaaggacccugagcugcggcauugaagcacacccaacccaacucgacugaagucagccucacugaaccggaucugagaaucuucucucucugggcuugccagggcucuccgaaccuagcuagcauccucuucaauuccaacuagaaagcuuaccaugaagugggugaccuucaucagccuccuguuccuguucuccagcgccuacucccuguuccaggaguaccagugcuacggcuccagcuccaacacccgggugcucaacgagcugaacuacgacaacgcggggaccaaccuguacaacgagcucgagaugaacuacuacggcaagcaggagaacugguacagccugaagaagaacucccgcagccugggggagaacgacgacggcaacaacgaggacaacgagaagcuccggaagcccaagcacaagaagcugaagcagccggccgacgggaaccccgaccccaacgccaaccccaacguggacccgaacgccaaccccaacgucgaccccaacgccaaccccaacguggacccgaacgcgaaccccaacgccaaccccaacgccaaccccaacgccaacccgaacgcgaaccccaacgccaaccccaacgccaaccccaacgccaacccgaacgccaaccccaacgcgaaccccaacgccaaccccaacgccaacccgaacgccaaccccaacgccaaccccaacgcgaaccccaacgccaacccgaacgccaaccccaacguggaccccaacgccaaccccaacgccaacccgaacgcgaaccccaacgccaaccccaacgccaacccgaacgccaaccccaacgccaaccccaacgcgaaccccaacgccaacccgaacgccaaccccaacgccaaccccaacgcgaaccccaacgccaacccgaacgccaaccccaacgccaaccccaacgccaaccccaacgcgaacccgaacgccaaccccaacaagaacaaccagggcaacggccaggggcacaacaugcccaacgaccccaaccgcaacgucgacgagaacgccaacgccaacuccgccgugaagaacaacaacaacgaggagccgagcgacaagcacaucaaggaguaccugaacaagauccagaacucccucagcacggaguggucccccugcagcgugaccugcggcaacgggauccagguccggaucaagcccggcuccgcgaacaagcccaaggacgagcuggacuacgccaacgacaucgagaagaagaucugcaagauggagaagugcagcuccguguucaacguggucaacagcuccccggugacgaacauggagaacaucaccagcggcuuccuggggccccuccuggugcugcaggccggcuucuuccuccugacccgcauccugaccaucccgcagucccucgacagcugguggaccucccugaacuuccucgggggcagccccgucugccuggggcagaacucccagagccccaccuccaaccacagccccaccuccugcccgcccaucugccccggcuaccgguggaugugccugcgccgguucaucaucuuccuguucauccuccugcugugccucaucuuccugcuggugcuccuggacuaccagggcaugcugcccgugugcccgcucauccccgggagcacgaccaccaacaccggccccugcaagacgugcaccacccccgcccaggggaacuccauguucccgagcugcugcugcaccaagcccacggacggcaacugcacgugcauccccauccccuccagcugggcguucgccaaguaccugugggagugggccuccguccgcuucagcuggcugucccuccuggugccguucgugcagugguucgucgggcugagccccaccguguggcucuccgccaucuggaugaugugguacuggggccccagccuguacagcaucgugucccccuucaucccgcugcuccccaucuucuucugccugugggucuacaucugaggacuagucccuguucccagagcccacuuuuuuuucuuuuuuugaaauaaaauagccugucuuucagaucucaaaggcucuuuucagagccaccaaaaaaaaaaaaaaaaaaaaaaaaaaaaaaaaaaaaaaaaaaaaaaaaaaaaaaaaaaaaaaaaaaaaaaaaaaaaaaaaaaaaaaaaaaaaaaaaaaaaa

SEQ ID NO: 9883 - RNA, 2031 nt, Artificial Sequence
  mRNA Design a-3 (hSL-A100) comprising derived and/or modified sequence from Pf(3D7)__XP_001351122.1__HsALB_Pf-CSP(19-384)_L(SGG)_Ferritin (opt1)
aggagagggcgcuuggcuugcaaggacccugagcugcggcauugaagcacacccaacccaacucgacugaagucagccucacugaaccggaucugagaaucuucucucucugggcuugccagggcucuccgaaccuagcuagcauccucuucaauuccaacuagaaagcuuaccaugaagugggugaccuucaucagccugcucuuccuguucuccagcgccuacucccuguuccaggaguaccagugcuacggcuccagcuccaacacccgggugcucaacgagcugaacuacgacaacgcggggaccaaccuguacaacgagcucgagaugaacuacuacggcaagcaggagaacugguacagccugaagaagaacucccgcagccugggggagaacgacgacggcaacaacgaggacaacgagaagcuccggaagcccaagcacaagaagcugaagcagccggccgacgggaaccccgaccccaacgccaaccccaacguggacccgaacgccaaccccaacgucgaccccaacgccaaccccaacguggacccgaacgcgaaccccaacgccaaccccaacgccaaccccaacgccaacccgaacgcgaaccccaacgccaaccccaacgccaaccccaacgccaacccgaacgccaaccccaacgcgaaccccaacgccaaccccaacgccaacccgaacgccaaccccaacgccaaccccaacgcgaaccccaacgccaacccgaacgccaaccccaacguggaccccaacgccaaccccaacgccaacccgaacgcgaaccccaacgccaaccccaacgccaacccgaacgccaaccccaacgccaaccccaacgcgaaccccaacgccaacccgaacgccaaccccaacgccaaccccaacgcgaaccccaacgccaacccgaacgccaaccccaacgccaaccccaacgccaaccccaacgcgaacccgaacgccaaccccaacaagaacaaccagggcaacggccaggggcacaacaugcccaacgaccccaaccgcaacgucgacgagaacgccaacgccaacuccgccgugaagaacaacaacaacgaggagccgagcgacaagcacaucaaggaguaccugaacaagauccagaacucccucagcacggaguggucccccugcagcgugaccugcggcaacgggauccagguccggaucaagcccggcuccgcgaacaagcccaaggacgagcuggacuacgccaacgacaucgagaagaagaucugcaagauggagaagugcagcuccguguucaacguggucaacagcuccagcggcgggcugagcaaggacaucaucaagcuccugaacgagcaggugaacaaggagaugaacuccagcaaccuguacauguccaugagcuccuggugcuacacccacagccucgacggcgccgggcuguuccuguucgaccacgccgcggaggaguacgagcacgccaagaagcucaucaucuuccugaacgagaacaacguccccgugcagcugaccuccaucagcgccccggagcacaaguucgagggccucacgcagaucuuccagaaggccuacgagcacgagcagcacaucuccgagagcaucaacaacaucguggaccacgccaucaaguccaaggaccacgcgaccuucaacuuccugcagugguacgucgccgagcagcacgaggaggaggugcuguucaaggacauccucgacaagaucgagcugaucgggaacgagaaccacggccuguaccucgccgaccaguacgugaaggggaucgccaagagccgcaaguccugaggacuagucccuguucccagagcccacuuuuuuuucuuuuuuugaaauaaaauagccugucuuucagaucucaaaggcucuuuucagagccaccaaaaaaaaaaaaaaaaaaaaaaaaaaaaaaaaaaaaaaaaaaaaaaaaaaaaaaaaaaaaaaaaaaaaaaaaaaaaaaaaaaaaaaaaaaaaaaaaaaaaa

SEQ ID NO: 9884 - RNA, 2031 nt, Artificial Sequence
  mRNA Design a-3 (hSL-A100) comprising derived and/or modified sequence from Pf(3D7)__XP_001351122.1__HsALB_Pf-CSP(19-384)_L(SGG)_Ferritin (opt1)
aggagagggcgcuuggcuugcaaggacccugagcugcggcauugaagcacacccaacccaacucgacugaagucagccucacugaaccggaucugagaaucuucucucucugggcuugccagggcucuccgaaccuagcuagcauccucuucaauuccaacuagaaagcuuaccaugaagugggugaccuucaucagccuccuguuccuguucuccagcgccuacucccuguuccaggaguaccagugcuacggcuccagcuccaacacccgggugcucaacgagcugaacuacgacaacgcggggaccaaccuguacaacgagcucgagaugaacuacuacggcaagcaggagaacugguacagccugaagaagaacucccgcagccugggggagaacgacgacggcaacaacgaggacaacgagaagcuccggaagcccaagcacaagaagcugaagcagccggccgacgggaaccccgaccccaacgccaaccccaacguggacccgaacgccaaccccaacgucgaccccaacgccaaccccaacguggacccgaacgcgaaccccaacgccaaccccaacgccaaccccaacgccaacccgaacgcgaaccccaacgccaaccccaacgccaaccccaacgccaacccgaacgccaaccccaacgcgaaccccaacgccaaccccaacgccaacccgaacgccaaccccaacgccaaccccaacgcgaaccccaacgccaacccgaacgccaaccccaacguggaccccaacgccaaccccaacgccaacccgaacgcgaaccccaacgccaaccccaacgccaacccgaacgccaaccccaacgccaaccccaacgcgaaccccaacgccaacccgaacgccaaccccaacgccaaccccaacgcgaaccccaacgccaacccgaacgccaaccccaacgccaaccccaacgccaaccccaacgcgaacccgaacgccaaccccaacaagaacaaccagggcaacggccaggggcacaacaugcccaacgaccccaaccgcaacgucgacgagaacgccaacgccaacuccgccgugaagaacaacaacaacgaggagccgagcgacaagcacaucaaggaguaccugaacaagauccagaacucccucagcacggaguggucccccugcagcgugaccugcggcaacgggauccagguccggaucaagcccggcuccgcgaacaagcccaaggacgagcuggacuacgccaacgacaucgagaagaagaucugcaagauggagaagugcagcuccguguucaacguggucaacagcuccagcggcgggcugagcaaggacaucaucaagcuccugaacgagcaggugaacaaggagaugaacuccagcaaccuguacauguccaugagcuccuggugcuacacccacagccucgacggcgccgggcuguuccuguucgaccacgccgcggaggaguacgagcacgccaagaagcucaucaucuuccugaacgagaacaacguccccgugcagcugaccuccaucagcgccccggagcacaaguucgagggccucacgcagaucuuccagaaggccuacgagcacgagcagcacaucuccgagagcaucaacaacaucguggaccacgccaucaaguccaaggaccacgcgaccuucaacuuccugcagugguacgucgccgagcagcacgaggaggaggugcuguucaaggacauccucgacaagaucgagcugaucgggaacgagaaccacggccuguaccucgccgaccaguacgugaaggggaucgccaagagccgcaaguccugaggacuagucccuguucccagagcccacuuuuuuuucuuuuuuugaaauaaaauagccugucuuucagaucucaaaggcucuuuucagagccaccaaaaaaaaaaaaaaaaaaaaaaaaaaaaaaaaaaaaaaaaaaaaaaaaaaaaaaaaaaaaaaaaaaaaaaaaaaaaaaaaaaaaaaaaaaaaaaaaaaaaa

SEQ ID NO: 9885 - RNA, 1992 nt, Artificial Sequence
  mRNA Design a-3 (hSL-A100) comprising derived and/or modified sequence from Pf(3D7)__XP_001351122.1__HsALB_Pf-CSP(93-384)_L(PVTN)_HBsAg (opt1)
aggagagggcgcuuggcuugcaaggacccugagcugcggcauugaagcacacccaacccaacucgacugaagucagccucacugaaccggaucugagaaucuucucucucugggcuugccagggcucuccgaaccuagcuagcauccucuucaauuccaacuagaaagcuuaccaugaagugggugaccuucaucagccugcucuuccuguucuccagcgccuacuccaagcugaagcagccggccgacgggaaccccgaccccaacgccaaccccaacguggacccgaacgccaaccccaacgucgaccccaacgccaaccccaacguggacccgaacgcgaaccccaacgccaaccccaacgccaaccccaacgccaacccgaacgcgaaccccaacgccaaccccaacgccaaccccaacgccaacccgaacgccaaccccaacgcgaaccccaacgccaaccccaacgccaacccgaacgccaaccccaacgccaaccccaacgcgaaccccaacgccaacccgaacgccaaccccaacguggaccccaacgccaaccccaacgccaacccgaacgcgaaccccaacgccaaccccaacgccaacccgaacgccaaccccaacgccaaccccaacgcgaaccccaacgccaacccgaacgccaaccccaacgccaaccccaacgcgaaccccaacgccaacccgaacgccaaccccaacgccaaccccaacgccaaccccaacgcgaacccgaacgccaaccccaacaagaacaaccagggcaacggccaggggcacaacaugcccaacgaccccaaccgcaacgucgacgagaacgccaacgccaacuccgccgugaagaacaacaacaacgaggagccgagcgacaagcacaucaaggaguaccugaacaagauccagaacucccucagcacggaguggucccccugcagcgugaccugcggcaacgggauccagguccggaucaagcccggcuccgcgaacaagcccaaggacgagcuggacuacgccaacgacaucgagaagaagaucugcaagauggagaagugcagcuccguguucaacguggucaacagcuccccggugacgaacauggagaacaucaccagcggcuuccuggggccccuccuggugcugcaggccggcuucuuccuccugacccgcauccugaccaucccgcagucccucgacagcugguggaccucccugaacuuccucgggggcagccccgucugccuggggcagaacucccagagccccaccuccaaccacagccccaccuccugcccgcccaucugccccggcuaccgguggaugugccugcgccgguucaucaucuuccuguucauccuccugcugugccucaucuuccugcuggugcuccuggacuaccagggcaugcugcccgugugcccgcucauccccgggagcacgaccaccaacaccggccccugcaagacgugcaccacccccgcccaggggaacuccauguucccgagcugcugcugcaccaagcccacggacggcaacugcacgugcauccccauccccuccagcugggcguucgccaaguaccugugggagugggccuccguccgcuucagcuggcugucccuccuggugccguucgugcagugguucgucgggcugagccccaccguguggcucuccgccaucuggaugaugugguacuggggccccagccuguacagcaucgugucccccuucaucccgcugcuccccaucuucuucugccugugggucuacaucugaggacuagucccuguucccagagcccacuuuuuuuucuuuuuuugaaauaaaauagccugucuuucagaucucaaaggcucuuuucagagccaccaaaaaaaaaaaaaaaaaaaaaaaaaaaaaaaaaaaaaaaaaaaaaaaaaaaaaaaaaaaaaaaaaaaaaaaaaaaaaaaaaaaaaaaaaaaaaaaaaaaaa

SEQ ID NO: 9886 - RNA, 1992 nt, Artificial Sequence
  mRNA Design a-3 (hSL-A100) comprising derived and/or modified sequence from Pf(3D7)__XP_001351122.1__HsALB_Pf-CSP(93-384)_L(PVTN)_HBsAg (opt1)
aggagagggcgcuuggcuugcaaggacccugagcugcggcauugaagcacacccaacccaacucgacugaagucagccucacugaaccggaucugagaaucuucucucucugggcuugccagggcucuccgaaccuagcuagcauccucuucaauuccaacuagaaagcuuaccaugaagugggugaccuucaucagccuccuguuccuguucuccagcgccuacuccaagcugaagcagccggccgacgggaaccccgaccccaacgccaaccccaacguggacccgaacgccaaccccaacgucgaccccaacgccaaccccaacguggacccgaacgcgaaccccaacgccaaccccaacgccaaccccaacgccaacccgaacgcgaaccccaacgccaaccccaacgccaaccccaacgccaacccgaacgccaaccccaacgcgaaccccaacgccaaccccaacgccaacccgaacgccaaccccaacgccaaccccaacgcgaaccccaacgccaacccgaacgccaaccccaacguggaccccaacgccaaccccaacgccaacccgaacgcgaaccccaacgccaaccccaacgccaacccgaacgccaaccccaacgccaaccccaacgcgaaccccaacgccaacccgaacgccaaccccaacgccaaccccaacgcgaaccccaacgccaacccgaacgccaaccccaacgccaaccccaacgccaaccccaacgcgaacccgaacgccaaccccaacaagaacaaccagggcaacggccaggggcacaacaugcccaacgaccccaaccgcaacgucgacgagaacgccaacgccaacuccgccgugaagaacaacaacaacgaggagccgagcgacaagcacaucaaggaguaccugaacaagauccagaacucccucagcacggaguggucccccugcagcgugaccugcggcaacgggauccagguccggaucaagcccggcuccgcgaacaagcccaaggacgagcuggacuacgccaacgacaucgagaagaagaucugcaagauggagaagugcagcuccguguucaacguggucaacagcuccccggugacgaacauggagaacaucaccagcggcuuccuggggccccuccuggugcugcaggccggcuucuuccuccugacccgcauccugaccaucccgcagucccucgacagcugguggaccucccugaacuuccucgggggcagccccgucugccuggggcagaacucccagagccccaccuccaaccacagccccaccuccugcccgcccaucugccccggcuaccgguggaugugccugcgccgguucaucaucuuccuguucauccuccugcugugccucaucuuccugcuggugcuccuggacuaccagggcaugcugcccgugugcccgcucauccccgggagcacgaccaccaacaccggccccugcaagacgugcaccacccccgcccaggggaacuccauguucccgagcugcugcugcaccaagcccacggacggcaacugcacgugcauccccauccccuccagcugggcguucgccaaguaccugugggagugggccuccguccgcuucagcuggcugucccuccuggugccguucgugcagugguucgucgggcugagccccaccguguggcucuccgccaucuggaugaugugguacuggggccccagccuguacagcaucgugucccccuucaucccgcugcuccccaucuucuucugccugugggucuacaucugaggacuagucccuguucccagagcccacuuuuuuuucuuuuuuugaaauaaaauagccugucuuucagaucucaaaggcucuuuucagagccaccaaaaaaaaaaaaaaaaaaaaaaaaaaaaaaaaaaaaaaaaaaaaaaaaaaaaaaaaaaaaaaaaaaaaaaaaaaaaaaaaaaaaaaaaaaaaaaaaaaaaa

SEQ ID NO: 9887 - RNA, 1653 nt, Artificial Sequence; identical to SEQ ID NO: 8288
  mRNA Design a-3 (hSL-A100) comprising derived and/or modified sequence from Pf(3D7)__XP_001351122.1__HsALB_Pf-CSP(199-377)_L(PVTN)_HBsAg (opt1)

SEQ ID NO: 9888 - RNA, 1350 nt, Artificial Sequence; identical to SEQ ID NO: 8272
  mRNA Design a-3 (hSL-A100) comprising derived and/or modified sequence from Pf(3D7)__XP_001351122.1__HsALB_Pf-CSP(19-272)_L(AAY)_Pf-CSP(310-3 27)_L(AAY)_Pf-CSP(346-375) (opt1)

SEQ ID NO: 9889 - RNA, 1350 nt, Artificial Sequence
  mRNA Design a-3 (hSL-A100) comprising derived and/or modified sequence from Pf(3D7)__XP_001351122.1__HsALB_Pf-CSP(19-272)_L(AAY)_Pf-CSP(346-3 75)_L(AAY)_Pf-CSP(310-327) (opt1)
aggagagggcgcuuggcuugcaaggacccugagcugcggcauugaagcacacccaacccaacucgacugaagucagccucacugaaccggaucugagaaucuucucucucugggcuugccagggcucuccgaaccuagcuagcauccucuucaauuccaacuagaaagcuuaccaugaagugggugaccuucaucagccuccuguuccuguucuccagcgccuacucccuguuccaggaguaccagugcuacggcuccagcuccaacacccgggugcucaacgagcugaacuacgacaacgcggggaccaaccuguacaacgagcucgagaugaacuacuacggcaagcaggagaacugguacagccugaagaagaacucccgcagccugggggagaacgacgacggcaacaacgaggacaacgagaagcuccggaagcccaagcacaagaagcugaagcagccggccgacgggaaccccgaccccaacgccaaccccaacguggacccgaacgccaaccccaacgucgaccccaacgccaaccccaacguggacccgaacgcgaaccccaacgccaaccccaacgccaaccccaacgccaacccgaacgcgaaccccaacgccaaccccaacgccaaccccaacgccaacccgaacgccaaccccaacgcgaaccccaacgccaaccccaacgccaacccgaacgccaaccccaacgccaaccccaacgcgaaccccaacgccaacccgaacgccaaccccaacguggaccccaacgccaaccccaacgccaacccgaacgcgaaccccaacgccaaccccaacgccaacccgaacgccaaccccaacgccaaccccaacgcgaaccccaacgccaacccgaacgccaaccccaacgccaaccccaacgcgaaccccaacgccaacccgaacgccaaccccaacgccaaccccaacgccaaccccaacgcgaacccgaacgccaaccccgcggccuacaucaagcccggcuccgcgaacaagcccaaggacgagcuggacuacgccaacgacaucgagaagaagaucugcaagauggagaagugcagcgccgcguaugagccgagcgacaagcacaucaaggaguaccugaacaagauccagaacucccucugaggacuagucccuguucccagagcccacuuuuuuuucuuuuuuugaaauaaaauagccugucuuucagaucucaaaggcucuuuucagagccaccaaaaaaaaaaaaaaaaaaaaaaaaaaaaaaaaaaaaaaaaaaaaaaaaaaaaaaaaaaaaaaaaaaaaaaaaaaaaaaaaaaaaaaaaaaaaaaaaaaaaa

SEQ ID NO: 9890 - RNA, 1398 nt, Artificial Sequence
  mRNA Design a-3 (hSL-A100) comprising derived and/or modified sequence from Pf(3D7)__XP_001351122.1__HsALB_Pf-CSP(19-272)_L(AAY)_Pf-CSP(346-3 75)_L(AAY)_Pf-CSP(310-327)_L(AAY)_PADRE (opt1)
aggagagggcgcuuggcuugcaaggacccugagcugcggcauugaagcacacccaacccaacucgacugaagucagccucacugaaccggaucugagaaucuucucucucugggcuugccagggcucuccgaaccuagcuagcauccucuucaauuccaacuagaaagcuuaccaugaagugggugaccuucaucagccuccuguuccuguucuccagcgccuacucccuguuccaggaguaccagugcuacggcuccagcuccaacacccgggugcucaacgagcugaacuacgacaacgcggggaccaaccuguacaacgagcucgagaugaacuacuacggcaagcaggagaacugguacagccugaagaagaacucccgcagccugggggagaacgacgacggcaacaacgaggacaacgagaagcuccggaagcccaagcacaagaagcugaagcagccggccgacgggaaccccgaccccaacgccaaccccaacguggacccgaacgccaaccccaacgucgaccccaacgccaaccccaacguggacccgaacgcgaaccccaacgccaaccccaacgccaaccccaacgccaacccgaacgcgaaccccaacgccaaccccaacgccaaccccaacgccaacccgaacgccaaccccaacgcgaaccccaacgccaaccccaacgccaacccgaacgccaaccccaacgccaaccccaacgcgaaccccaacgccaacccgaacgccaaccccaacguggaccccaacgccaaccccaacgccaacccgaacgcgaaccccaacgccaaccccaacgccaacccgaacgccaaccccaacgccaaccccaacgcgaaccccaacgccaacccgaacgccaaccccaacgccaaccccaacgcgaaccccaacgccaacccgaacgccaaccccaacgccaaccccaacgccaaccccaacgcgaacccgaacgccaaccccgccgcguauaucaagcccggcuccgcgaacaagcccaaggacgagcuggacuacgccaacgacaucgagaagaagaucugcaagauggagaagugcagcgcggccuacgagccgagcgacaagcacaucaaggaguaccugaacaagauccagaacucccucgccgccuacgccaaguucguggccgccuggacccugaaggcggccgccugaggacuagucccuguucccagagcccacuuuuuuuucuuuuuuugaaauaaaauagccugucuuucagaucucaaaggcucuuuucagagccaccaaaaaaaaaaaaaaaaaaaaaaaaaaaaaaaaaaaaaaaaaaaaaaaaaaaaaaaaaaaaaaaaaaaaaaaaaaaaaaaaaaaaaaaaaaaaaaaaaaaaa

SEQ ID NO: 9891 - RNA, 1398 nt, Artificial Sequence
  mRNA Design a-3 (hSL-A100) comprising derived and/or modified sequence from Pf(3D7)__XP_001351122.1__HsALB_Pf-CSP(19-272)_L(AAY)_Pf-CSP(310-3 27)_L(AAY)_Pf-CSP(346-375)_L(AAY)_PADRE (opt1)
aggagagggcgcuuggcuugcaaggacccugagcugcggcauugaagcacacccaacccaacucgacugaagucagccucacugaaccggaucugagaaucuucucucucugggcuugccagggcucuccgaaccuagcuagcauccucuucaauuccaacuagaaagcuuaccaugaagugggugaccuucaucagccuccuguuccuguucuccagcgccuacucccuguuccaggaguaccagugcuacggcuccagcuccaacacccgggugcucaacgagcugaacuacgacaacgcggggaccaaccuguacaacgagcucgagaugaacuacuacggcaagcaggagaacugguacagccugaagaagaacucccgcagccugggggagaacgacgacggcaacaacgaggacaacgagaagcuccggaagcccaagcacaagaagcugaagcagccggccgacgggaaccccgaccccaacgccaaccccaacguggacccgaacgccaaccccaacgucgaccccaacgccaaccccaacguggacccgaacgcgaaccccaacgccaaccccaacgccaaccccaacgccaacccgaacgcgaaccccaacgccaaccccaacgccaaccccaacgccaacccgaacgccaaccccaacgcgaaccccaacgccaaccccaacgccaacccgaacgccaaccccaacgccaaccccaacgcgaaccccaacgccaacccgaacgccaaccccaacguggaccccaacgccaaccccaacgccaacccgaacgcgaaccccaacgccaaccccaacgccaacccgaacgccaaccccaacgccaaccccaacgcgaaccccaacgccaacccgaacgccaaccccaacgccaaccccaacgcgaaccccaacgccaacccgaacgccaaccccaacgccaaccccaacgccaaccccaacgcgaacccgaacgccaaccccgccgcguaugagccgagcgacaagcacaucaaggaguaccugaacaagauccagaacucccucgcggccuacaucaagcccggcuccgcgaacaagcccaaggacgagcuggacuacgccaacgacaucgagaagaagaucugcaagauggagaagugcagcgccgccuacgccaaguucguggccgccuggacccugaaggcggccgccugaggacuagucccuguucccagagcccacuuuuuuuucuuuuuuugaaauaaaauagccugucuuucagaucucaaaggcucuuuucagagccaccaaaaaaaaaaaaaaaaaaaaaaaaaaaaaaaaaaaaaaaaaaaaaaaaaaaaaaaaaaaaaaaaaaaaaaaaaaaaaaaaaaaaaaaaaaaaaaaaaaaaa

SEQ ID NO: 9892 - RNA, 1452 nt, Artificial Sequence
  mRNA Design a-3 (hSL-A100) comprising derived and/or modified sequence from Pf(3D7)__XP_001351122.1__HsALB_Pf-CSP(19-272)_L(AAY)_Pf-CSP(310-3 27)_L(AAY)_Pf-CSP(346-375)_L(AAY)_PADRE_L(AAY)_P2 (opt1)
aggagagggcgcuuggcuugcaaggacccugagcugcggcauugaagcacacccaacccaacucgacugaagucagccucacugaaccggaucugagaaucuucucucucugggcuugccagggcucuccgaaccuagcuagcauccucuucaauuccaacuagaaagcuuaccaugaagugggugaccuucaucagccuccuguuccuguucuccagcgccuacucccuguuccaggaguaccagugcuacggcuccagcuccaacacccgggugcucaacgagcugaacuacgacaacgcggggaccaaccuguacaacgagcucgagaugaacuacuacggcaagcaggagaacugguacagccugaagaagaacucccgcagccugggggagaacgacgacggcaacaacgaggacaacgagaagcuccggaagcccaagcacaagaagcugaagcagccggccgacgggaaccccgaccccaacgccaaccccaacguggacccgaacgccaaccccaacgucgaccccaacgccaaccccaacguggacccgaacgcgaaccccaacgccaaccccaacgccaaccccaacgccaacccgaacgcgaaccccaacgccaaccccaacgccaaccccaacgccaacccgaacgccaaccccaacgcgaaccccaacgccaaccccaacgccaacccgaacgccaaccccaacgccaaccccaacgcgaaccccaacgccaacccgaacgccaaccccaacguggaccccaacgccaaccccaacgccaacccgaacgcgaaccccaacgccaaccccaacgccaacccgaacgccaaccccaacgccaaccccaacgcgaaccccaacgccaacccgaacgccaaccccaacgccaaccccaacgcgaaccccaacgccaacccgaacgccaaccccaacgccaaccccaacgccaaccccaacgcgaacccgaacgccaaccccgcggccuacgagccgagcgacaagcacaucaaggaguaccugaacaagauccagaacucccucgccgcguauaucaagcccggcuccgcgaacaagcccaaggacgagcuggacuacgccaacgacaucgagaagaagaucugcaagauggagaagugcagcgccgccuacgccaaguucguggccgccuggacccugaaggcggccgccgccgcuuaccaguacaucaaggccaacagcaaguucaucggcaucaccgagcugugaggacuagucccuguucccagagcccacuuuuuuuucuuuuuuugaaauaaaauagccugucuuucagaucucaaaggcucuuuucagagccaccaaaaaaaaaaaaaaaaaaaaaaaaaaaaaaaaaaaaaaaaaaaaaaaaaaaaaaaaaaaaaaaaaaaaaaaaaaaaaaaaaaaaaaaaaaaaaaaaaaaaa

SEQ ID NO: 9893 - RNA, 1416 nt, Artificial Sequence
  mRNA Design a-3 (hSL-A100) comprising derived and/or modified sequence from Pf(3D7)__XP_001351122.1__HsALB_Pf-CSP(19-272)_L(AAY)_Pf-CSP(310-3 27)_Linker (AAY)_Pf-CSP(346-397) (opt1)
aggagagggcgcuuggcuugcaaggacccugagcugcggcauugaagcacacccaacccaacucgacugaagucagccucacugaaccggaucugagaaucuucucucucugggcuugccagggcucuccgaaccuagcuagcauccucuucaauuccaacuagaaagcuuaccaugaagugggugaccuucaucagccuccuguuccuguucuccagcgccuacucccuguuccaggaguaccagugcuacggcuccagcuccaacacccgggugcucaacgagcugaacuacgacaacgcggggaccaaccuguacaacgagcucgagaugaacuacuacggcaagcaggagaacugguacagccugaagaagaacucccgcagccugggggagaacgacgacggcaacaacgaggacaacgagaagcuccggaagcccaagcacaagaagcugaagcagccggccgacgggaaccccgaccccaacgccaaccccaacguggacccgaacgccaaccccaacgucgaccccaacgccaaccccaacguggacccgaacgcgaaccccaacgccaaccccaacgccaaccccaacgccaacccgaacgcgaaccccaacgccaaccccaacgccaaccccaacgccaacccgaacgccaaccccaacgcgaaccccaacgccaaccccaacgccaacccgaacgccaaccccaacgccaaccccaacgcgaaccccaacgccaacccgaacgccaaccccaacguggaccccaacgccaaccccaacgccaacccgaacgcgaaccccaacgccaaccccaacgccaacccgaacgccaaccccaacgccaaccccaacgcgaaccccaacgccaacccgaacgccaaccccaacgccaaccccaacgcgaaccccaacgccaacccgaacgccaaccccaacgccaaccccaacgccaaccccaacgcgaacccgaacgccaaccccgcggccuacgagccgagcgacaagcacaucaaggaguaccugaacaagauccagaacucccucgccgcguauaucaagcccggcuccgcgaacaagcccaaggacgagcuggacuacgccaacgacaucgagaagaagaucugcaagauggagaagugcagcuccguguucaacguggucaacagcuccaucgggcugaucauggugcucagcuuccuguuccugaacugaggacuagucccuguucccagagcccacuuuuuuuucuuuuuuugaaauaaaauagccugucuuucagaucucaaaggcucuuuucagagccaccaaaaaaaaaaaaaaaaaaaaaaaaaaaaaaaaaaaaaaaaaaaaaaaaaaaaaaaaaaaaaaaaaaaaaaaaaaaaaaaaaaaaaaaaaaaaaaaaaaaaa

SEQ ID NO: 9894 - RNA, 2016 nt, Artificial Sequence
  mRNA Design a-3 (hSL-A100) comprising derived and/or modified sequence from Pf(3D7)__XP_001351122.1__LumSynt_L(GGS4-GGG)_Pf-CSP(19-397) (opt1)
aggagagggcgcuuggcuugcaaggacccugagcugcggcauugaagcacacccaacccaacucgacugaagucagccucacugaaccggaucugagaaucuucucucucugggcuugccagggcucuccgaaccuagcuagcauccucuucaauuccaacuagaaagcuuaccaugcagaucuacgagggcaagcugaccgccgaggggcuccgcuucggcaucguggccagccgguucaaccacgcgcuggucgaccgccugguggagggggccaucgacgccaucgugcggcacggcgggcgcgaggaggacaucacccucguccgggugcccggcuccugggagaucccgguggccgccggcgagcuggcgcgcaaggaggacaucgacgccgucaucgccaucggggugcugauccggggcgccacgccccacuucgacuacaucgcgagcgagguguccaaggggcucgccgaccugagccuggagcuccgcaagcccaucaccuucggcgucaucaccgccgacacccuggagcaggccaucgagcgggccgggacgaagcacggcaacaagggcugggaggcggcccuguccgccaucgagauggccaaccucuucaagagccugcgcgggggcuccgggggcagcggcggguccggcgggagcggcgggggccuguuccaggaguaccagugcuacggcuccagcuccaacacccgggugcucaacgagcugaacuacgacaacgccgggaccaaccuguacaacgagcucgagaugaacuacuacggcaagcaggagaacugguacagccugaagaagaacucccgcagccugggggagaacgacgacggcaacaacgaggacaacgagaagcuccggaagcccaagcacaagaagcugaagcagccggcggacgggaaccccgaccccaacgccaaccccaacguggacccgaacgccaaccccaacgucgaccccaacgccaaccccaacguggacccgaacgccaaccccaacgcgaaccccaacgccaaccccaacgccaacccgaacgccaaccccaacgccaaccccaacgcgaaccccaacgccaacccgaacgccaaccccaacgccaaccccaacgcgaaccccaacgccaacccgaacgccaaccccaacgccaaccccaacgccaaccccaacgcgaacccgaacgccaaccccaacguggaccccaacgccaacccgaacgccaaccccaacgccaaccccaacgcgaaccccaacgccaacccgaacgccaaccccaacgccaaccccaacgccaaccccaacgcgaacccgaacgccaaccccaacgccaaccccaacgccaaccccaacgcgaacccgaacgccaaccccaacgccaaccccaacgccaaccccaacgccaacccgaacgcgaaccccaacaagaacaaccagggcaacggccaggggcacaacaugcccaacgaccccaaccgcaacgucgacgagaacgccaacgccaacuccgccgugaagaacaacaacaacgaggagccgagcgacaagcacaucaaggaguaccugaacaagauccagaacucccucagcaccgaguggagccccugcuccgugacgugcggcaacgggauccagguccggaucaagcccggcagcgccaacaagcccaaggacgagcuggacuacgcgaacgacaucgagaagaagaucugcaagauggagaagugcuccagcguguucaacguggucaacuccagcaucgggcugaucauggugcucuccuuccuguuccugaacugaggacuagucccuguucccagagcccacuuuuuuuucuuuuuuugaaauaaaauagccugucuuucagaucucaaaggcucuuuucagagccaccaaaaaaaaaaaaaaaaaaaaaaaaaaaaaaaaaaaaaaaaaaaaaaaaaaaaaaaaaaaaaaaaaaaaaaaaaaaaaaaaaaaaaaaaaaaaaaaaaaaaa

SEQ ID NO: 9895 - RNA, 1878 nt, Artificial Sequence
  mRNA Design a-3 (hSL-A100) comprising derived and/or modified sequence from Pf(3D7)__XP_001351122.1__HsALB_Pf-CSP(19-272)_L(PVTN)_HBsAg (opt1)
aggagagggcgcuuggcuugcaaggacccugagcugcggcauugaagcacacccaacccaacucgacugaagucagccucacugaaccggaucugagaaucuucucucucugggcuugccagggcucuccgaaccuagcuagcauccucuucaauuccaacuagaaagcuuaccaugaagugggugaccuucaucagccuccuguuccuguucuccagcgccuacucccuguuccaggaguaccagugcuacggcagcuccagcaacacccgcguccucaacgagcugaacuacgacaacgccgggaccaaccuguacaacgagcucgagaugaacuacuacggcaagcaggagaacugguacucccugaagaagaacagccggucccugggggagaacgacgacggcaacaacgaggacaacgagaagcuccgcaagcccaagcacaagaagcugaagcagccggcggacgggaaccccgaccccaacgccaaccccaacguggacccgaacgccaaccccaacguggaccccaacgccaaccccaacgucgacccgaacgccaaccccaacgcgaaccccaacgccaaccccaacgccaacccgaacgccaaccccaacgcgaaccccaacgccaaccccaacgccaacccgaacgccaaccccaacgccaaccccaacgcgaaccccaacgccaacccgaacgccaaccccaacgccaaccccaacgccaaccccaacgcgaacccgaacgccaaccccaacguggaccccaacgccaaccccaacgccaacccgaacgccaaccccaacgcgaaccccaacgccaacccgaacgccaaccccaacgccaaccccaacgccaaccccaacgcgaacccgaacgccaaccccaacgccaaccccaacgccaaccccaacgcgaacccgaacgccaaccccaacgccaaccccaacgccaaccccaacgccaacccgaacgcgaacccgcccgugaccaacauggagaacaucaccagcggcuuccugggcccccuccugguccugcaggccggguucuuccuccugacccggauccugacgaucccccagucccucgacagcugguggaccucccugaacuuccugggcgggagccccgugugccucggccagaacucccagagccccaccuccaaccacagccccaccuccugcccgcccaucugccccggguaccgcuggaugugccugcggcgcuucaucaucuuccuguucauccuccugcugugccucaucuuccugcuggugcuccuggacuaccagggcaugcugcccgucugcccgcucauccccggcagcacgaccaccaacaccgggcccugcaagacgugcaccaccccggcccagggcaacagcauguuccccuccugcugcugcaccaagcccacggacgggaacugcacgugcauccccaucccgagcuccugggccuucgccaaguaccugugggagugggcgagcgugcgguucuccuggcugagccuccuggugcccuucguccagugguucgugggccugucccccaccguguggcucagcgccaucuggaugaugugguacuggggccccucccuguacagcaucgucuccccguucaucccccugcuccccaucuucuucugccuguggguguacaucugaggacuagucccuguucccagagcccacuuuuuuuucuuuuuuugaaauaaaauagccugucuuucagaucucaaaggcucuuuucagagccaccaaaaaaaaaaaaaaaaaaaaaaaaaaaaaaaaaaaaaaaaaaaaaaaaaaaaaaaaaaaaaaaaaaaaaaaaaaaaaaaaaaaaaaaaaaaaaaaaaaaaa

SEQ ID NO: 9896 - RNA, 1995 nt, Artificial Sequence
  mRNA Design a-3 (hSL-A100) comprising derived and/or modified sequence from Pf(3D7)__XP_001351122.1__HsALB_Pf-CSP(19-272)_L(AAY)_Pf-CSP(346-3 65)_L(AAY)_PADRE_L(PVTN)_HBsAg (opt1)
aggagagggcgcuuggcuugcaaggacccugagcugcggcauugaagcacacccaacccaacucgacugaagucagccucacugaaccggaucugagaaucuucucucucugggcuugccagggcucuccgaaccuagcuagcauccucuucaauuccaacuagaaagcuuaccaugaagugggugaccuucaucagccugcuguuccuguucuccagcgccuacucccuguuccaggaguaccagugcuacggcagcuccagcaacacccgcguccucaacgagcugaacuacgacaacgccgggaccaaccuguacaacgagcucgagaugaacuacuacggcaagcaggagaacugguacucccugaagaagaacagccggucccugggggagaacgacgacggcaacaacgaggacaacgagaagcuccgcaagcccaagcacaagaagcugaagcagccggcggacgggaaccccgaccccaacgccaaccccaacguggacccgaacgccaaccccaacguggaccccaacgccaaccccaacgucgacccgaacgccaaccccaacgcgaaccccaacgccaaccccaacgccaacccgaacgccaaccccaacgcgaaccccaacgccaaccccaacgccaacccgaacgccaaccccaacgccaaccccaacgcgaaccccaacgccaacccgaacgccaaccccaacgccaaccccaacgccaaccccaacgcgaacccgaacgccaaccccaacguggaccccaacgccaaccccaacgccaacccgaacgccaaccccaacgcgaaccccaacgccaacccgaacgccaaccccaacgccaaccccaacgccaaccccaacgcgaacccgaacgccaaccccaacgccaaccccaacgccaaccccaacgcgaacccgaacgccaaccccaacgccaaccccaacgccaaccccaacgccaacccgaacgcgaaccccgccgccuacaucaagcccggcagcgccaacaagcccaaggacgagcuggacuacgccaacgacaucgaggcggccuacgccaaguucguggccgccuggacccucaaggcggccgccccggucaccaacauggagaacaucaccuccggcuuccuggggccccugcucgugcugcaggccggcuucuuccugcucacgcggauccugaccaucccccagagccuggacuccugguggaccagccucaacuuccucgggggcucccccgugugccuggggcagaacagccaguccccgaccagcaaccacucccccacgagcugcccgcccaucugccccggcuaccgcuggaugugccuccggcgcuucaucaucuuccuguucauccugcuccugugccugaucuuccuccugguccugcucgacuaccagggcaugcugcccgugugcccccugaucccggggagcaccaccaccaacacgggccccugcaagaccugcaccacccccgcgcaggggaacuccauguuccccagcugcugcugcacgaagccgaccgacggcaacugcacgugcauccccauccccuccagcugggccuucgccaaguaccucugggagugggccuccgugcgguucagcuggcugucccugcucguccccuucgugcagugguucgugggccugagcccgaccgucuggcuguccgccaucuggaugaugugguacugggggcccagccucuacuccaucgugagccccuucaucccccugcugccgaucuucuucugccucuggguguacaucugaggacuagucccuguucccagagcccacuuuuuuuucuuuuuuugaaauaaaauagccugucuuucagaucucaaaggcucuuuucagagccaccaaaaaaaaaaaaaaaaaaaaaaaaaaaaaaaaaaaaaaaaaaaaaaaaaaaaaaaaaaaaaaaaaaaaaaaaaaaaaaaaaaaaaaaaaaaaaaaaaaaaa

SEQ ID NO: 9897 - RNA, 2214 nt, Artificial Sequence
  mRNA Design a-3 (hSL-A100) comprising derived and/or modified sequence from Pf(3D7)__XP_001351122.1__HsALB_Pf-CSP(19-384)_L(PVTN)_HBsAg (opt1)
aggagagggcgcuuggcuugcaaggacccugagcugcggcauugaagcacacccaacccaacucgacugaagucagccucacugaaccggaucugagaaucuucucucucugggcuugccagggcucuccgaaccuagcuagcauccucuucaauuccaacuagaaagcuuaccaugaagugggugaccuucaucagccugcuguuccuguucuccagcgccuacucccuguuccaggaguaccagugcuacggcagcuccagcaacacccgcguccucaacgagcugaacuacgacaacgccgggacgaaccuguacaacgagcucgagaugaacuacuacggcaagcaggagaacugguacucccugaagaagaacagccggucccugggggagaacgacgacggcaacaacgaggacaacgagaagcuccgcaagcccaagcacaagaagcugaagcagccggcggacgggaaccccgaccccaacgccaaccccaacguggacccgaacgccaaccccaacguggaccccaacgccaaccccaacgucgacccgaacgccaaccccaacgcgaaccccaacgccaaccccaacgccaacccgaacgccaaccccaacgcgaaccccaacgccaaccccaacgccaacccgaacgccaaccccaacgccaaccccaacgcgaaccccaacgccaacccgaacgccaaccccaacgccaaccccaacgccaaccccaacgcgaacccgaacgccaaccccaacguggaccccaacgccaaccccaacgccaacccgaacgccaaccccaacgcgaaccccaacgccaacccgaacgccaaccccaacgccaaccccaacgccaaccccaacgcgaacccgaacgccaaccccaacgccaaccccaacgccaaccccaacgcgaacccgaacgccaaccccaacgccaaccccaacgccaaccccaacgccaacccgaacgcgaaccccaacaagaacaaccagggcaacggccaggggcacaacaugcccaacgaccccaaccggaacguggacgagaacgccaacgccaacagcgccgucaagaacaacaacaacgaggagccguccgacaagcacaucaaggaguaccugaacaagauccagaacagccucuccaccgaguggagccccugcuccgugaccugcggcaacgggauccaggugcgcaucaagcccggcagcgccaacaagcccaaggacgagcuggacuacgcgaacgacaucgagaagaagaucugcaagauggagaagugcuccagcgucuucaacguggugaacuccagcccggucaccaacauggagaacaucacgagcggguuccugggcccccuccuggugcugcaggccggcuucuuccuccugacccggauccugaccaucccccagucccucgacagcugguggaccucccugaacuuccucgggggcagccccgugugccucgggcagaacucccagagcccgacguccaaccacagccccaccuccugcccgcccaucugccccggcuaccgcuggaugugccugcggcgcuucaucaucuuccuguucauccuccugcugugccucaucuuccugcugguccuccuggacuaccagggcaugcugcccgugugcccccucaucccggggagcaccaccacgaacaccggccccugcaagaccugcaccacgcccgcccaggggaacuccauguuccccagcugcugcugcaccaagccgaccgacggcaacugcacgugcauccccauccccuccagcugggccuucgccaaguaccugugggagugggcguccgugcgguucagcuggcugucccuccugguccccuucgugcagugguucguggggcugagcccgaccgucuggcucuccgccaucuggaugaugugguacuggggccccagccuguacagcaucgugucccccuucaucccccugcucccgaucuucuucugccuguggguguacaucugaggacuagucccuguucccagagcccacuuuuuuuucuuuuuuugaaauaaaauagccugucuuucagaucucaaaggcucuuuucagagccaccaaaaaaaaaaaaaaaaaaaaaaaaaaaaaaaaaaaaaaaaaaaaaaaaaaaaaaaaaaaaaaaaaaaaaaaaaaaaaaaaaaaaaaaaaaaaaaaaaaaaa

SEQ ID NO: 9898 - RNA, 2031 nt, Artificial Sequence
  mRNA Design a-3 (hSL-A100) comprising derived and/or modified sequence from Pf(3D7)__XP_001351122.1__HsALB_Pf-CSP(19-384)_L(SGG)_Ferritin (opt1)
aggagagggcgcuuggcuugcaaggacccugagcugcggcauugaagcacacccaacccaacucgacugaagucagccucacugaaccggaucugagaaucuucucucucugggcuugccagggcucuccgaaccuagcuagcauccucuucaauuccaacuagaaagcuuaccaugaagugggugaccuucaucagccuccuguuccuguucuccagcgccuacucccuguuccaggaguaccagugcuacggcagcuccagcaacacccggguccucaacgagcugaacuacgacaacgccgggacgaaccuguacaacgagcucgagaugaacuacuacggcaagcaggagaacugguacucccugaagaagaacagccggucccugggggagaacgacgacggcaacaacgaggacaacgagaagcuccgcaagcccaagcacaagaagcugaagcagccggcggacgggaaccccgaccccaacgccaaccccaacguggacccgaacgccaaccccaacguggaccccaacgccaaccccaacgucgacccgaacgccaaccccaacgcgaaccccaacgccaaccccaacgccaacccgaacgccaaccccaacgcgaaccccaacgccaaccccaacgccaacccgaacgccaaccccaacgccaaccccaacgcgaaccccaacgccaacccgaacgccaaccccaacgccaaccccaacgccaaccccaacgcgaacccgaacgccaaccccaacguggaccccaacgccaaccccaacgccaacccgaacgccaaccccaacgcgaaccccaacgccaacccgaacgccaaccccaacgccaaccccaacgccaaccccaacgcgaacccgaacgccaaccccaacgccaaccccaacgccaaccccaacgcgaacccgaacgccaaccccaacgccaaccccaacgccaaccccaacgccaacccgaacgcgaaccccaacaagaacaaccagggcaacggccaggggcacaacaugcccaacgaccccaaccggaacguggacgagaacgccaacgccaacagcgccgucaagaacaacaacaacgaggagccguccgacaagcacaucaaggaguaccugaacaagauccagaacagccucuccaccgaguggagccccugcuccgugaccugcggcaacgggauccaggugcgcaucaagcccggcagcgccaacaagcccaaggacgagcuggacuacgcgaacgacaucgagaagaagaucugcaagauggagaagugcuccagcgucuucaacguggugaacuccagcagcgggggccuguccaaggacaucaucaagcuccugaacgagcaggucaacaaggagaugaacagcuccaaccuguacaugagcauguccagcuggugcuacacccacucccucgacggcgccgggcuguuccuguucgaccacgccgccgaggaguacgagcacgccaagaagcucaucaucuuccugaacgagaacaacgugccggugcagcugacgagcaucuccgcgcccgagcacaaguucgagggccucacccagaucuuccagaaggccuacgagcacgagcagcacaucagcgaguccaucaacaacaucgucgaccacgccaucaagagcaaggaccacgccaccuucaacuuccugcagugguacguggcggagcagcacgaggaggaggugcuguucaaggacauccucgacaagaucgagcugaucgggaacgagaaccacggccuguaccucgccgaccaguacgucaagggcaucgccaagucccgcaagagcugaggacuagucccuguucccagagcccacuuuuuuuucuuuuuuugaaauaaaauagccugucuuucagaucucaaaggcucuuuucagagccaccaaaaaaaaaaaaaaaaaaaaaaaaaaaaaaaaaaaaaaaaaaaaaaaaaaaaaaaaaaaaaaaaaaaaaaaaaaaaaaaaaaaaaaaaaaaaaaaaaaaaa

SEQ ID NO: 9899 - RNA, 1992 nt, Artificial Sequence
  mRNA Design a-3 (hSL-A100) comprising derived and/or modified sequence from Pf(3D7)__XP_001351122.1__HsALB_Pf-CSP(93-384)_L(PVTN)_HBsAg (opt1)
aggagagggcgcuuggcuugcaaggacccugagcugcggcauugaagcacacccaacccaacucgacugaagucagccucacugaaccggaucugagaaucuucucucucugggcuugccagggcucuccgaaccuagcuagcauccucuucaauuccaacuagaaagcuuaccaugaagugggugaccuucaucagccuccuguuccuguucuccagcgccuacuccaagcugaagcagcccgccgacggcaacccggaccccaacgcgaaccccaacgucgaccccaacgccaacccgaacguggaccccaacgccaaccccaacguggaccccaacgccaacccgaacgccaaccccaacgcgaaccccaacgccaaccccaacgccaacccgaacgccaaccccaacgcgaaccccaacgccaaccccaacgccaacccgaacgccaaccccaacgccaaccccaacgcgaaccccaacgccaacccgaacgccaaccccaacgccaaccccaacgccaaccccaacgcgaacccgaacgucgaccccaacgccaaccccaacgccaaccccaacgccaacccgaacgccaaccccaacgcgaaccccaacgccaacccgaacgccaaccccaacgccaaccccaacgccaaccccaacgcgaacccgaacgccaaccccaacgccaaccccaacgccaaccccaacgcgaacccgaacgccaaccccaacgccaaccccaacgccaaccccaacgccaacccgaacaagaacaaccaggggaacggccaggggcacaacaugcccaacgaccccaaccgcaacguggacgagaacgcgaacgccaacagcgccgugaagaacaacaacaacgaggagcccuccgacaagcacaucaaggaguaccucaacaagauccagaacagccuguccaccgaguggagcccgugcuccgugaccugcggcaacgggauccagguccggaucaagcccggcagcgccaacaagcccaaggacgagcuggacuacgccaacgacaucgagaagaagaucugcaagauggagaagugcuccagcguguucaacgucgugaacuccagccccgugaccaacauggagaacaucaccuccggcuuccucgggccgcugcugguccuccaggcgggcuucuuccugcugacccgcauccucacgaucccccagagccuggacuccugguggaccagccugaacuuccucgggggcucccccgugugccuggggcagaacagccagagccccaccuccaaccacagcccgaccuccugcccgcccaucugccccggcuaccgguggaugugccugcgccgguucaucaucuuccucuucauccugcugcucugccugaucuuccugcucgugcugcuggacuaccagggcaugcuccccgucugcccccugauccccgggagcacgaccaccaacaccggcccgugcaagacgugcaccacccccgcccaggggaacuccauguuccccagcugcugcugcaccaagcccacggacggcaacugcacgugcaucccgauccccuccagcugggccuucgccaaguaccugugggagugggccuccgugcgcuucagcuggcucucccugcuggugcccuucguccagugguucgugggccucagccccaccguguggcuguccgcgaucuggaugaugugguacugggggccgagccuguacuccaucgucagccccuucaucccccuccugcccaucuucuucugccuguggguguacaucugaggacuagucccuguucccagagcccacuuuuuuuucuuuuuuugaaauaaaauagccugucuuucagaucucaaaggcucuuuucagagccaccaaaaaaaaaaaaaaaaaaaaaaaaaaaaaaaaaaaaaaaaaaaaaaaaaaaaaaaaaaaaaaaaaaaaaaaaaaaaaaaaaaaaaaaaaaaaaaaaaaaaa

SEQ ID NO: 9900 - RNA, 1653 nt, Artificial Sequence; identical to SEQ ID NO: 8318
  mRNA Design a-3 (hSL-A100) comprising derived and/or modified sequence from Pf(3D7)__XP_001351122.1__HsALB_Pf-CSP(199-377)_L(PVTN)_HBsAg (opt1)

SEQ ID NO: 9901 - RNA, 1350 nt, Artificial Sequence
  mRNA Design a-3 (hSL-A100) comprising derived and/or modified sequence from Pf(3D7)__XP_001351122.1__HsALB_Pf-CSP(19-272)_L(AAY)_Pf-CSP(346-3 75)_L(AAY)_Pf-CSP(310-327) (opt1)
aggagagggcgcuuggcuugcaaggacccugagcugcggcauugaagcacacccaacccaacucgacugaagucagccucacugaaccggaucugagaaucuucucucucugggcuugccagggcucuccgaaccuagcuagcauccucuucaauuccaacuagaaagcuuaccaugaagugggugaccuucaucagccuccuguuccuguucuccagcgccuacucccuguuccaggaguaccagugcuacggcagcuccagcaacacccgcguccucaacgagcugaacuacgacaacgccgggacgaaccuguacaacgagcucgagaugaacuacuacggcaagcaggagaacugguacucccugaagaagaacagccggucccugggggagaacgacgacggcaacaacgaggacaacgagaagcuccgcaagcccaagcacaagaagcugaagcagccggcggacgggaaccccgaccccaacgccaaccccaacguggacccgaacgccaaccccaacguggaccccaacgccaaccccaacgucgacccgaacgccaaccccaacgcgaaccccaacgccaaccccaacgccaacccgaacgccaaccccaacgcgaaccccaacgccaaccccaacgccaacccgaacgccaaccccaacgccaaccccaacgcgaaccccaacgccaacccgaacgccaaccccaacgccaaccccaacgccaaccccaacgcgaacccgaacgccaaccccaacguggaccccaacgccaaccccaacgccaacccgaacgccaaccccaacgcgaaccccaacgccaacccgaacgccaaccccaacgccaaccccaacgccaaccccaacgcgaacccgaacgccaaccccaacgccaaccccaacgccaaccccaacgcgaacccgaacgccaaccccaacgccaaccccaacgccaaccccaacgccaacccgaacgcgaaccccgccgccuacaucaagcccggcagcgccaacaagcccaaggacgagcuggacuacgccaacgacaucgagaagaagaucugcaagauggagaagugcuccgcggccuacgagccgagcgacaagcacaucaaggaguaccucaacaagauccagaacucccugugaggacuagucccuguucccagagcccacuuuuuuuucuuuuuuugaaauaaaauagccugucuuucagaucucaaaggcucuuuucagagccaccaaaaaaaaaaaaaaaaaaaaaaaaaaaaaaaaaaaaaaaaaaaaaaaaaaaaaaaaaaaaaaaaaaaaaaaaaaaaaaaaaaaaaaaaaaaaaaaaaaaaa

SEQ ID NO: 9902 - RNA, 1398 nt, Artificial Sequence
  mRNA Design a-3 (hSL-A100) comprising derived and/or modified sequence from Pf(3D7)__XP_001351122.1__HsALB_Pf-CSP(19-272)_L(AAY)_Pf-CSP(346-3 75)_L(AAY)_Pf-CSP(310-327)_L(AAY)_PADRE (opt1)
aggagagggcgcuuggcuugcaaggacccugagcugcggcauugaagcacacccaacccaacucgacugaagucagccucacugaaccggaucugagaaucuucucucucugggcuugccagggcucuccgaaccuagcuagcauccucuucaauuccaacuagaaagcuuaccaugaagugggugaccuucaucagccuccuguuccuguucuccagcgccuacucccuguuccaggaguaccagugcuacggcagcuccagcaacacccgcguccucaacgagcugaacuacgacaacgccgggacgaaccuguacaacgagcucgagaugaacuacuacggcaagcaggagaacugguacucccugaagaagaacagccggucccugggggagaacgacgacggcaacaacgaggacaacgagaagcuccgcaagcccaagcacaagaagcugaagcagccggcggacgggaaccccgaccccaacgccaaccccaacguggacccgaacgccaaccccaacguggaccccaacgccaaccccaacgucgacccgaacgccaaccccaacgcgaaccccaacgccaaccccaacgccaacccgaacgccaaccccaacgcgaaccccaacgccaaccccaacgccaacccgaacgccaaccccaacgccaaccccaacgcgaaccccaacgccaacccgaacgccaaccccaacgccaaccccaacgccaaccccaacgcgaacccgaacgccaaccccaacguggaccccaacgccaaccccaacgccaacccgaacgccaaccccaacgcgaaccccaacgccaacccgaacgccaaccccaacgccaaccccaacgccaaccccaacgcgaacccgaacgccaaccccaacgccaaccccaacgccaaccccaacgcgaacccgaacgccaaccccaacgccaaccccaacgccaaccccaacgccaacccgaacgcgaaccccgccgccuacaucaagcccggcagcgccaacaagcccaaggacgagcuggacuacgccaacgacaucgagaagaagaucugcaagauggagaagugcuccgcggccuacgagccgagcgacaagcacaucaaggaguaccucaacaagauccagaacucccuggccgccuacgccaaguucguggcggccuggacccugaaggccgccgcgugaggacuagucccuguucccagagcccacuuuuuuuucuuuuuuugaaauaaaauagccugucuuucagaucucaaaggcucuuuucagagccaccaaaaaaaaaaaaaaaaaaaaaaaaaaaaaaaaaaaaaaaaaaaaaaaaaaaaaaaaaaaaaaaaaaaaaaaaaaaaaaaaaaaaaaaaaaaaaaaaaaaaa

SEQ ID NO: 9903 - RNA, 1398 nt, Artificial Sequence
  mRNA Design a-3 (hSL-A100) comprising derived and/or modified sequence from Pf(3D7)__XP_001351122.1__HsALB_Pf-CSP(19-272)_L(AAY)_Pf-CSP(310-3 27)_L(AAY)_Pf-CSP(346-375)_L(AAY)_PADRE (opt1)
aggagagggcgcuuggcuugcaaggacccugagcugcggcauugaagcacacccaacccaacucgacugaagucagccucacugaaccggaucugagaaucuucucucucugggcuugccagggcucuccgaaccuagcuagcauccucuucaauuccaacuagaaagcuuaccaugaagugggugaccuucaucagccuccuguuccuguucuccagcgccuacucccuguuccaggaguaccagugcuacggcagcuccagcaacacccgcguccucaacgagcugaacuacgacaacgccgggacgaaccuguacaacgagcucgagaugaacuacuacggcaagcaggagaacugguacucccugaagaagaacagccggucccugggggagaacgacgacggcaacaacgaggacaacgagaagcuccgcaagcccaagcacaagaagcugaagcagccggcggacgggaaccccgaccccaacgccaaccccaacguggacccgaacgccaaccccaacguggaccccaacgccaaccccaacgucgacccgaacgccaaccccaacgcgaaccccaacgccaaccccaacgccaacccgaacgccaaccccaacgcgaaccccaacgccaaccccaacgccaacccgaacgccaaccccaacgccaaccccaacgcgaaccccaacgccaacccgaacgccaaccccaacgccaaccccaacgccaaccccaacgcgaacccgaacgccaaccccaacguggaccccaacgccaaccccaacgccaacccgaacgccaaccccaacgcgaaccccaacgccaacccgaacgccaaccccaacgccaaccccaacgccaaccccaacgcgaacccgaacgccaaccccaacgccaaccccaacgccaaccccaacgcgaacccgaacgccaaccccaacgccaaccccaacgccaaccccaacgccaacccgaacgcgaaccccgccgccuacgagcccagcgacaagcacaucaaggaguaccugaacaagauccagaacucccucgccgccuacaucaagcccggcagcgcgaacaagccgaaggacgagcuggacuacgccaacgacaucgagaagaagaucugcaagauggagaagugcuccgccgccuacgccaaguucguggcggccuggacccugaaggccgccgcgugaggacuagucccuguucccagagcccacuuuuuuuucuuuuuuugaaauaaaauagccugucuuucagaucucaaaggcucuuuucagagccaccaaaaaaaaaaaaaaaaaaaaaaaaaaaaaaaaaaaaaaaaaaaaaaaaaaaaaaaaaaaaaaaaaaaaaaaaaaaaaaaaaaaaaaaaaaaaaaaaaaaaa

SEQ ID NO: 9904 - RNA, 1452 nt, Artificial Sequence
  mRNA Design a-3 (hSL-A100) comprising derived and/or modified sequence from Pf(3D7)__XP_001351122.1__HsALB_Pf-CSP(19-272)_L(AAY)_Pf-CSP(310-3 27)_L(AAY)_Pf-CSP(346-375)_L(AAY)_PADRE_L(AAY)_P2 (opt1)
aggagagggcgcuuggcuugcaaggacccugagcugcggcauugaagcacacccaacccaacucgacugaagucagccucacugaaccggaucugagaaucuucucucucugggcuugccagggcucuccgaaccuagcuagcauccucuucaauuccaacuagaaagcuuaccaugaagugggugaccuucaucagccuccuguuccuguucuccagcgccuacucccuguuccaggaguaccagugcuacggcagcuccagcaacacccgcguccucaacgagcugaacuacgacaacgccgggacgaaccuguacaacgagcucgagaugaacuacuacggcaagcaggagaacugguacucccugaagaagaacagccggucccugggggagaacgacgacggcaacaacgaggacaacgagaagcuccgcaagcccaagcacaagaagcugaagcagccggcggacgggaaccccgaccccaacgccaaccccaacguggacccgaacgccaaccccaacguggaccccaacgccaaccccaacgucgacccgaacgccaaccccaacgcgaaccccaacgccaaccccaacgccaacccgaacgccaaccccaacgcgaaccccaacgccaaccccaacgccaacccgaacgccaaccccaacgccaaccccaacgcgaaccccaacgccaacccgaacgccaaccccaacgccaaccccaacgccaaccccaacgcgaacccgaacgccaaccccaacguggaccccaacgccaaccccaacgccaacccgaacgccaaccccaacgcgaaccccaacgccaacccgaacgccaaccccaacgccaaccccaacgccaaccccaacgcgaacccgaacgccaaccccaacgccaaccccaacgccaaccccaacgcgaacccgaacgccaaccccaacgccaaccccaacgccaaccccaacgccaacccgaacgcgaaccccgccgccuacgagcccagcgacaagcacaucaaggaguaccugaacaagauccagaacucccucgccgccuacaucaagcccggcagcgcgaacaagccgaaggacgagcuggacuacgccaacgacaucgagaagaagaucugcaagauggagaagugcuccgccgccuacgccaaguucguggcggccuggacccugaaggccgccgcggccgccuaccaguacaucaaggccaacagcaaguucaucggcaucaccgagcucugaggacuagucccuguucccagagcccacuuuuuuuucuuuuuuugaaauaaaauagccugucuuucagaucucaaaggcucuuuucagagccaccaaaaaaaaaaaaaaaaaaaaaaaaaaaaaaaaaaaaaaaaaaaaaaaaaaaaaaaaaaaaaaaaaaaaaaaaaaaaaaaaaaaaaaaaaaaaaaaaaaaaa

SEQ ID NO: 9905 - RNA, 1416 nt, Artificial Sequence
  mRNA Design a-3 (hSL-A100) comprising derived and/or modified sequence from Pf(3D7)__XP_001351122.1__HsALB_Pf-CSP(19-272)_L(AAY)_Pf-CSP(310-3 27)_Linker (AAY)_Pf-CSP(346-397) (opt1)
aggagagggcgcuuggcuugcaaggacccugagcugcggcauugaagcacacccaacccaacucgacugaagucagccucacugaaccggaucugagaaucuucucucucugggcuugccagggcucuccgaaccuagcuagcauccucuucaauuccaacuagaaagcuuaccaugaagugggugaccuucaucagccuccuguuccuguucuccagcgccuacucccuguuccaggaguaccagugcuacggcagcuccagcaacacccgcguccucaacgagcugaacuacgacaacgccgggacgaaccuguacaacgagcucgagaugaacuacuacggcaagcaggagaacugguacucccugaagaagaacagccggucccugggggagaacgacgacggcaacaacgaggacaacgagaagcuccgcaagcccaagcacaagaagcugaagcagccggcggacgggaaccccgaccccaacgccaaccccaacguggacccgaacgccaaccccaacguggaccccaacgccaaccccaacgucgacccgaacgccaaccccaacgcgaaccccaacgccaaccccaacgccaacccgaacgccaaccccaacgcgaaccccaacgccaaccccaacgccaacccgaacgccaaccccaacgccaaccccaacgcgaaccccaacgccaacccgaacgccaaccccaacgccaaccccaacgccaaccccaacgcgaacccgaacgccaaccccaacguggaccccaacgccaaccccaacgccaacccgaacgccaaccccaacgcgaaccccaacgccaacccgaacgccaaccccaacgccaaccccaacgccaaccccaacgcgaacccgaacgccaaccccaacgccaaccccaacgccaaccccaacgcgaacccgaacgccaaccccaacgccaaccccaacgccaaccccaacgccaacccgaacgcgaaccccgccgccuacgagcccagcgacaagcacaucaaggaguaccugaacaagauccagaacucccucgccgccuacaucaagcccggcagcgcgaacaagccgaaggacgagcuggacuacgccaacgacaucgagaagaagaucugcaagauggagaagugcuccagcguguucaacgucgugaacuccagcaucggccugaucauggugcucuccuuccuguuccugaacugaggacuagucccuguucccagagcccacuuuuuuuucuuuuuuugaaauaaaauagccugucuuucagaucucaaaggcucuuuucagagccaccaaaaaaaaaaaaaaaaaaaaaaaaaaaaaaaaaaaaaaaaaaaaaaaaaaaaaaaaaaaaaaaaaaaaaaaaaaaaaaaaaaaaaaaaaaaaaaaaaaaaa

SEQ ID NO: 9906 - RNA, 2016 nt, Artificial Sequence
  mRNA Design a-3 (hSL-A100) comprising derived and/or modified sequence from Pf(3D7)__XP_001351122.1__LumSynt_L(GGS4-GGG)_Pf-CSP(19-397) (opt2)
aggagagggcgcuuggcuugcaaggacccugagcugcggcauugaagcacacccaacccaacucgacugaagucagccucacugaaccggaucugagaaucuucucucucugggcuugccagggcucuccgaaccuagcuagcauccucuucaauuccaacuagaaagcuuaccaugcagaucuacgagggcaagcucaccgccgagggccuccgcuucggcaucgucgccucccgcuucaaccacgcccucgucgaccgccucgucgagggcgccaucgacgccaucguccgccacggcggccgcgaggaggacaucacccucguccgcguccccggcuccugggagauccccgucgccgccggcgagcucgcccgcaaggaggacaucgacgccgucaucgccaucggcguccucauccgcggcgccaccccccacuucgacuacaucgccuccgaggucuccaagggccucgccgaccucucccucgagcuccgcaagcccaucaccuucggcgucaucaccgccgacacccucgagcaggccaucgagcgcgccggcaccaagcacggcaacaagggcugggaggccgcccucuccgccaucgagauggccaaccucuucaagucccuccgcggcggcuccggcggcuccggcggcuccggcggcuccggcggcggccucuuccaggaguaccagugcuacggcuccuccuccaacacccgcguccucaacgagcucaacuacgacaacgccggcaccaaccucuacaacgagcucgagaugaacuacuacggcaagcaggagaacugguacucccucaagaagaacucccgcucccucggcgagaacgacgacggcaacaacgaggacaacgagaagcuccgcaagcccaagcacaagaagcucaagcagcccgccgacggcaaccccgaccccaacgccaaccccaacgucgaccccaacgccaaccccaacgucgaccccaacgccaaccccaacgucgaccccaacgccaaccccaacgccaaccccaacgccaaccccaacgccaaccccaacgccaaccccaacgccaaccccaacgccaaccccaacgccaaccccaacgccaaccccaacgccaaccccaacgccaaccccaacgccaaccccaacgccaaccccaacgccaaccccaacgccaaccccaacgccaaccccaacgccaaccccaacgucgaccccaacgccaaccccaacgccaaccccaacgccaaccccaacgccaaccccaacgccaaccccaacgccaaccccaacgccaaccccaacgccaaccccaacgccaaccccaacgccaaccccaacgccaaccccaacgccaaccccaacgccaaccccaacgccaaccccaacgccaaccccaacgccaaccccaacgccaaccccaacgccaaccccaacaagaacaaccagggcaacggccagggccacaacaugcccaacgaccccaaccgcaacgucgacgagaacgccaacgccaacuccgccgucaagaacaacaacaacgaggagcccuccgacaagcacaucaaggaguaccucaacaagauccagaacucccucuccaccgaguggucccccugcuccgucaccugcggcaacggcauccagguccgcaucaagcccggcuccgccaacaagcccaaggacgagcucgacuacgccaacgacaucgagaagaagaucugcaagauggagaagugcuccuccgucuucaacgucgucaacuccuccaucggccucaucaugguccucuccuuccucuuccucaacugaggacuagucccuguucccagagcccacuuuuuuuucuuuuuuugaaauaaaauagccugucuuucagaucucaaaggcucuuuucagagccaccaaaaaaaaaaaaaaaaaaaaaaaaaaaaaaaaaaaaaaaaaaaaaaaaaaaaaaaaaaaaaaaaaaaaaaaaaaaaaaaaaaaaaaaaaaaaaaaaaaaaa

SEQ ID NO: 9907 - RNA, 1878 nt, Artificial Sequence
  mRNA Design a-3 (hSL-A100) comprising derived and/or modified sequence from Pf(3D7)__XP_001351122.1__HsALB_Pf-CSP(19-272)_L(PVTN)_HBsAg (opt2)
aggagagggcgcuuggcuugcaaggacccugagcugcggcauugaagcacacccaacccaacucgacugaagucagccucacugaaccggaucugagaaucuucucucucugggcuugccagggcucuccgaaccuagcuagcauccucuucaauuccaacuagaaagcuuaccaugaagugggucaccuucaucucccuccucuuccucuucuccuccgccuacucccucuuccaggaguaccagugcuacggcuccuccuccaacacccgcguccucaacgagcucaacuacgacaacgccggcaccaaccucuacaacgagcucgagaugaacuacuacggcaagcaggagaacugguacucccucaagaagaacucccgcucccucggcgagaacgacgacggcaacaacgaggacaacgagaagcuccgcaagcccaagcacaagaagcucaagcagcccgccgacggcaaccccgaccccaacgccaaccccaacgucgaccccaacgccaaccccaacgucgaccccaacgccaaccccaacgucgaccccaacgccaaccccaacgccaaccccaacgccaaccccaacgccaaccccaacgccaaccccaacgccaaccccaacgccaaccccaacgccaaccccaacgccaaccccaacgccaaccccaacgccaaccccaacgccaaccccaacgccaaccccaacgccaaccccaacgccaaccccaacgccaaccccaacgccaaccccaacgucgaccccaacgccaaccccaacgccaaccccaacgccaaccccaacgccaaccccaacgccaaccccaacgccaaccccaacgccaaccccaacgccaaccccaacgccaaccccaacgccaaccccaacgccaaccccaacgccaaccccaacgccaaccccaacgccaaccccaacgccaaccccaacgccaaccccaacgccaaccccaacgccaacccccccgucaccaacauggagaacaucaccuccggcuuccucggcccccuccucguccuccaggccggcuucuuccuccucacccgcauccucaccaucccccagucccucgacuccugguggaccucccucaacuuccucggcggcucccccgucugccucggccagaacucccagucccccaccuccaaccacucccccaccuccugcccccccaucugccccggcuaccgcuggaugugccuccgccgcuucaucaucuuccucuucauccuccuccucugccucaucuuccuccucguccuccucgacuaccagggcaugcuccccgucugcccccucauccccggcuccaccaccaccaacaccggccccugcaagaccugcaccacccccgcccagggcaacuccauguuccccuccugcugcugcaccaagcccaccgacggcaacugcaccugcauccccauccccuccuccugggccuucgccaaguaccucugggagugggccuccguccgcuucuccuggcucucccuccucguccccuucguccagugguucgucggccucucccccaccgucuggcucuccgccaucuggaugaugugguacuggggccccucccucuacuccaucgucucccccuucaucccccuccuccccaucuucuucugccucugggucuacaucugaggacuagucccuguucccagagcccacuuuuuuuucuuuuuuugaaauaaaauagccugucuuucagaucucaaaggcucuuuucagagccaccaaaaaaaaaaaaaaaaaaaaaaaaaaaaaaaaaaaaaaaaaaaaaaaaaaaaaaaaaaaaaaaaaaaaaaaaaaaaaaaaaaaaaaaaaaaaaaaaaaaaa

SEQ ID NO: 9908 - RNA, 1995 nt, Artificial Sequence
  mRNA Design a-3 (hSL-A100) comprising derived and/or modified sequence from Pf(3D7)__XP_001351122.1__HsALB_Pf-CSP(19-272)_L(AAY)_Pf-CSP(346-3 65)_L(AAY)_PADRE_L(PVTN)_HBsAg (opt2)
aggagagggcgcuuggcuugcaaggacccugagcugcggcauugaagcacacccaacccaacucgacugaagucagccucacugaaccggaucugagaaucuucucucucugggcuugccagggcucuccgaaccuagcuagcauccucuucaauuccaacuagaaagcuuaccaugaagugggucaccuucaucucccuccucuuccucuucuccuccgccuacucccucuuccaggaguaccagugcuacggcuccuccuccaacacccgcguccucaacgagcucaacuacgacaacgccggcaccaaccucuacaacgagcucgagaugaacuacuacggcaagcaggagaacugguacucccucaagaagaacucccgcucccucggcgagaacgacgacggcaacaacgaggacaacgagaagcuccgcaagcccaagcacaagaagcucaagcagcccgccgacggcaaccccgaccccaacgccaaccccaacgucgaccccaacgccaaccccaacgucgaccccaacgccaaccccaacgucgaccccaacgccaaccccaacgccaaccccaacgccaaccccaacgccaaccccaacgccaaccccaacgccaaccccaacgccaaccccaacgccaaccccaacgccaaccccaacgccaaccccaacgccaaccccaacgccaaccccaacgccaaccccaacgccaaccccaacgccaaccccaacgccaaccccaacgccaaccccaacgucgaccccaacgccaaccccaacgccaaccccaacgccaaccccaacgccaaccccaacgccaaccccaacgccaaccccaacgccaaccccaacgccaaccccaacgccaaccccaacgccaaccccaacgccaaccccaacgccaaccccaacgccaaccccaacgccaaccccaacgccaaccccaacgccaaccccaacgccaaccccaacgccaaccccgccgccuacaucaagcccggcuccgccaacaagcccaaggacgagcucgacuacgccaacgacaucgaggccgccuacgccaaguucgucgccgccuggacccucaaggccgccgcccccgucaccaacauggagaacaucaccuccggcuuccucggcccccuccucguccuccaggccggcuucuuccuccucacccgcauccucaccaucccccagucccucgacuccugguggaccucccucaacuuccucggcggcucccccgucugccucggccagaacucccagucccccaccuccaaccacucccccaccuccugcccccccaucugccccggcuaccgcuggaugugccuccgccgcuucaucaucuuccucuucauccuccuccucugccucaucuuccuccucguccuccucgacuaccagggcaugcuccccgucugcccccucauccccggcuccaccaccaccaacaccggccccugcaagaccugcaccacccccgcccagggcaacuccauguuccccuccugcugcugcaccaagcccaccgacggcaacugcaccugcauccccauccccuccuccugggccuucgccaaguaccucugggagugggccuccguccgcuucuccuggcucucccuccucguccccuucguccagugguucgucggccucucccccaccgucuggcucuccgccaucuggaugaugugguacuggggccccucccucuacuccaucgucucccccuucaucccccuccuccccaucuucuucugccucugggucuacaucugaggacuagucccuguucccagagcccacuuuuuuuucuuuuuuugaaauaaaauagccugucuuucagaucucaaaggcucuuuucagagccaccaaaaaaaaaaaaaaaaaaaaaaaaaaaaaaaaaaaaaaaaaaaaaaaaaaaaaaaaaaaaaaaaaaaaaaaaaaaaaaaaaaaaaaaaaaaaaaaaaaaaa

SEQ ID NO: 9909 - RNA, 2214 nt, Artificial Sequence
  mRNA Design a-3 (hSL-A100) comprising derived and/or modified sequence from Pf(3D7)__XP_001351122.1__HsALB_Pf-CSP(19-384)_L(PVTN)_HBsAg (opt2)
aggagagggcgcuuggcuugcaaggacccugagcugcggcauugaagcacacccaacccaacucgacugaagucagccucacugaaccggaucugagaaucuucucucucugggcuugccagggcucuccgaaccuagcuagcauccucuucaauuccaacuagaaagcuuaccaugaagugggucaccuucaucucccuccucuuccucuucuccuccgccuacucccucuuccaggaguaccagugcuacggcuccuccuccaacacccgcguccucaacgagcucaacuacgacaacgccggcaccaaccucuacaacgagcucgagaugaacuacuacggcaagcaggagaacugguacucccucaagaagaacucccgcucccucggcgagaacgacgacggcaacaacgaggacaacgagaagcuccgcaagcccaagcacaagaagcucaagcagcccgccgacggcaaccccgaccccaacgccaaccccaacgucgaccccaacgccaaccccaacgucgaccccaacgccaaccccaacgucgaccccaacgccaaccccaacgccaaccccaacgccaaccccaacgccaaccccaacgccaaccccaacgccaaccccaacgccaaccccaacgccaaccccaacgccaaccccaacgccaaccccaacgccaaccccaacgccaaccccaacgccaaccccaacgccaaccccaacgccaaccccaacgccaaccccaacgccaaccccaacgucgaccccaacgccaaccccaacgccaaccccaacgccaaccccaacgccaaccccaacgccaaccccaacgccaaccccaacgccaaccccaacgccaaccccaacgccaaccccaacgccaaccccaacgccaaccccaacgccaaccccaacgccaaccccaacgccaaccccaacgccaaccccaacgccaaccccaacgccaaccccaacgccaaccccaacaagaacaaccagggcaacggccagggccacaacaugcccaacgaccccaaccgcaacgucgacgagaacgccaacgccaacuccgccgucaagaacaacaacaacgaggagcccuccgacaagcacaucaaggaguaccucaacaagauccagaacucccucuccaccgaguggucccccugcuccgucaccugcggcaacggcauccagguccgcaucaagcccggcuccgccaacaagcccaaggacgagcucgacuacgccaacgacaucgagaagaagaucugcaagauggagaagugcuccuccgucuucaacgucgucaacuccucccccgucaccaacauggagaacaucaccuccggcuuccucggcccccuccucguccuccaggccggcuucuuccuccucacccgcauccucaccaucccccagucccucgacuccugguggaccucccucaacuuccucggcggcucccccgucugccucggccagaacucccagucccccaccuccaaccacucccccaccuccugcccccccaucugccccggcuaccgcuggaugugccuccgccgcuucaucaucuuccucuucauccuccuccucugccucaucuuccuccucguccuccucgacuaccagggcaugcuccccgucugcccccucauccccggcuccaccaccaccaacaccggccccugcaagaccugcaccacccccgcccagggcaacuccauguuccccuccugcugcugcaccaagcccaccgacggcaacugcaccugcauccccauccccuccuccugggccuucgccaaguaccucugggagugggccuccguccgcuucuccuggcucucccuccucguccccuucguccagugguucgucggccucucccccaccgucuggcucuccgccaucuggaugaugugguacuggggccccucccucuacuccaucgucucccccuucaucccccuccuccccaucuucuucugccucugggucuacaucugaggacuagucccuguucccagagcccacuuuuuuuucuuuuuuugaaauaaaauagccugucuuucagaucucaaaggcucuuuucagagccaccaaaaaaaaaaaaaaaaaaaaaaaaaaaaaaaaaaaaaaaaaaaaaaaaaaaaaaaaaaaaaaaaaaaaaaaaaaaaaaaaaaaaaaaaaaaaaaaaaaaaa

SEQ ID NO: 9910 - RNA, 2031 nt, Artificial Sequence
  mRNA Design a-3 (hSL-A100) comprising derived and/or modified sequence from Pf(3D7)__XP_001351122.1__HsALB_Pf-CSP(19-384)_L(SGG)_Ferritin (opt2)
aggagagggcgcuuggcuugcaaggacccugagcugcggcauugaagcacacccaacccaacucgacugaagucagccucacugaaccggaucugagaaucuucucucucugggcuugccagggcucuccgaaccuagcuagcauccucuucaauuccaacuagaaagcuuaccaugaagugggucaccuucaucucccuccucuuccucuucuccuccgccuacucccucuuccaggaguaccagugcuacggcuccuccuccaacacccgcguccucaacgagcucaacuacgacaacgccggcaccaaccucuacaacgagcucgagaugaacuacuacggcaagcaggagaacugguacucccucaagaagaacucccgcucccucggcgagaacgacgacggcaacaacgaggacaacgagaagcuccgcaagcccaagcacaagaagcucaagcagcccgccgacggcaaccccgaccccaacgccaaccccaacgucgaccccaacgccaaccccaacgucgaccccaacgccaaccccaacgucgaccccaacgccaaccccaacgccaaccccaacgccaaccccaacgccaaccccaacgccaaccccaacgccaaccccaacgccaaccccaacgccaaccccaacgccaaccccaacgccaaccccaacgccaaccccaacgccaaccccaacgccaaccccaacgccaaccccaacgccaaccccaacgccaaccccaacgccaaccccaacgucgaccccaacgccaaccccaacgccaaccccaacgccaaccccaacgccaaccccaacgccaaccccaacgccaaccccaacgccaaccccaacgccaaccccaacgccaaccccaacgccaaccccaacgccaaccccaacgccaaccccaacgccaaccccaacgccaaccccaacgccaaccccaacgccaaccccaacgccaaccccaacgccaaccccaacaagaacaaccagggcaacggccagggccacaacaugcccaacgaccccaaccgcaacgucgacgagaacgccaacgccaacuccgccgucaagaacaacaacaacgaggagcccuccgacaagcacaucaaggaguaccucaacaagauccagaacucccucuccaccgaguggucccccugcuccgucaccugcggcaacggcauccagguccgcaucaagcccggcuccgccaacaagcccaaggacgagcucgacuacgccaacgacaucgagaagaagaucugcaagauggagaagugcuccuccgucuucaacgucgucaacuccuccuccggcggccucuccaaggacaucaucaagcuccucaacgagcaggucaacaaggagaugaacuccuccaaccucuacauguccauguccuccuggugcuacacccacucccucgacggcgccggccucuuccucuucgaccacgccgccgaggaguacgagcacgccaagaagcucaucaucuuccucaacgagaacaacguccccguccagcucaccuccaucuccgcccccgagcacaaguucgagggccucacccagaucuuccagaaggccuacgagcacgagcagcacaucuccgaguccaucaacaacaucgucgaccacgccaucaaguccaaggaccacgccaccuucaacuuccuccagugguacgucgccgagcagcacgaggaggagguccucuucaaggacauccucgacaagaucgagcucaucggcaacgagaaccacggccucuaccucgccgaccaguacgucaagggcaucgccaagucccgcaaguccugaggacuagucccuguucccagagcccacuuuuuuuucuuuuuuugaaauaaaauagccugucuuucagaucucaaaggcucuuuucagagccaccaaaaaaaaaaaaaaaaaaaaaaaaaaaaaaaaaaaaaaaaaaaaaaaaaaaaaaaaaaaaaaaaaaaaaaaaaaaaaaaaaaaaaaaaaaaaaaaaaaaaa

SEQ ID NO: 9911 - RNA, 1992 nt, Artificial Sequence
  mRNA Design a-3 (hSL-A100) comprising derived and/or modified sequence from Pf(3D7)__XP_001351122.1__HsALB_Pf-CSP(93-384)_L(PVTN)_HBsAg (opt2)
aggagagggcgcuuggcuugcaaggacccugagcugcggcauugaagcacacccaacccaacucgacugaagucagccucacugaaccggaucugagaaucuucucucucugggcuugccagggcucuccgaaccuagcuagcauccucuucaauuccaacuagaaagcuuaccaugaagugggucaccuucaucucccuccucuuccucuucuccuccgccuacuccaagcucaagcagcccgccgacggcaaccccgaccccaacgccaaccccaacgucgaccccaacgccaaccccaacgucgaccccaacgccaaccccaacgucgaccccaacgccaaccccaacgccaaccccaacgccaaccccaacgccaaccccaacgccaaccccaacgccaaccccaacgccaaccccaacgccaaccccaacgccaaccccaacgccaaccccaacgccaaccccaacgccaaccccaacgccaaccccaacgccaaccccaacgccaaccccaacgccaaccccaacgccaaccccaacgucgaccccaacgccaaccccaacgccaaccccaacgccaaccccaacgccaaccccaacgccaaccccaacgccaaccccaacgccaaccccaacgccaaccccaacgccaaccccaacgccaaccccaacgccaaccccaacgccaaccccaacgccaaccccaacgccaaccccaacgccaaccccaacgccaaccccaacgccaaccccaacgccaaccccaacaagaacaaccagggcaacggccagggccacaacaugcccaacgaccccaaccgcaacgucgacgagaacgccaacgccaacuccgccgucaagaacaacaacaacgaggagcccuccgacaagcacaucaaggaguaccucaacaagauccagaacucccucuccaccgaguggucccccugcuccgucaccugcggcaacggcauccagguccgcaucaagcccggcuccgccaacaagcccaaggacgagcucgacuacgccaacgacaucgagaagaagaucugcaagauggagaagugcuccuccgucuucaacgucgucaacuccucccccgucaccaacauggagaacaucaccuccggcuuccucggcccccuccucguccuccaggccggcuucuuccuccucacccgcauccucaccaucccccagucccucgacuccugguggaccucccucaacuuccucggcggcucccccgucugccucggccagaacucccagucccccaccuccaaccacucccccaccuccugcccccccaucugccccggcuaccgcuggaugugccuccgccgcuucaucaucuuccucuucauccuccuccucugccucaucuuccuccucguccuccucgacuaccagggcaugcuccccgucugcccccucauccccggcuccaccaccaccaacaccggccccugcaagaccugcaccacccccgcccagggcaacuccauguuccccuccugcugcugcaccaagcccaccgacggcaacugcaccugcauccccauccccuccuccugggccuucgccaaguaccucugggagugggccuccguccgcuucuccuggcucucccuccucguccccuucguccagugguucgucggccucucccccaccgucuggcucuccgccaucuggaugaugugguacuggggccccucccucuacuccaucgucucccccuucaucccccuccuccccaucuucuucugccucugggucuacaucugaggacuagucccuguucccagagcccacuuuuuuuucuuuuuuugaaauaaaauagccugucuuucagaucucaaaggcucuuuucagagccaccaaaaaaaaaaaaaaaaaaaaaaaaaaaaaaaaaaaaaaaaaaaaaaaaaaaaaaaaaaaaaaaaaaaaaaaaaaaaaaaaaaaaaaaaaaaaaaaaaaaaa

SEQ ID NO: 9912 - RNA, 1653 nt, Artificial Sequence; identical to SEQ ID NO: 8348
  mRNA Design a-3 (hSL-A100) comprising derived and/or modified sequence from Pf(3D7)__XP_001351122.1__HsALB_Pf-CSP(199-377)_L(PVTN)_HBsAg (opt2)

SEQ ID NO: 9913 - RNA, 1350 nt, Artificial Sequence
  mRNA Design a-3 (hSL-A100) comprising derived and/or modified sequence from Pf(3D7)__XP_001351122.1__HsALB_Pf-CSP(19-272)_L(AAY)_Pf-CSP(346-3 75)_L(AAY)_Pf-CSP(310-327) (opt2)
aggagagggcgcuuggcuugcaaggacccugagcugcggcauugaagcacacccaacccaacucgacugaagucagccucacugaaccggaucugagaaucuucucucucugggcuugccagggcucuccgaaccuagcuagcauccucuucaauuccaacuagaaagcuuaccaugaagugggucaccuucaucucccuccucuuccucuucuccuccgccuacucccucuuccaggaguaccagugcuacggcuccuccuccaacacccgcguccucaacgagcucaacuacgacaacgccggcaccaaccucuacaacgagcucgagaugaacuacuacggcaagcaggagaacugguacucccucaagaagaacucccgcucccucggcgagaacgacgacggcaacaacgaggacaacgagaagcuccgcaagcccaagcacaagaagcucaagcagcccgccgacggcaaccccgaccccaacgccaaccccaacgucgaccccaacgccaaccccaacgucgaccccaacgccaaccccaacgucgaccccaacgccaaccccaacgccaaccccaacgccaaccccaacgccaaccccaacgccaaccccaacgccaaccccaacgccaaccccaacgccaaccccaacgccaaccccaacgccaaccccaacgccaaccccaacgccaaccccaacgccaaccccaacgccaaccccaacgccaaccccaacgccaaccccaacgccaaccccaacgucgaccccaacgccaaccccaacgccaaccccaacgccaaccccaacgccaaccccaacgccaaccccaacgccaaccccaacgccaaccccaacgccaaccccaacgccaaccccaacgccaaccccaacgccaaccccaacgccaaccccaacgccaaccccaacgccaaccccaacgccaaccccaacgccaaccccaacgccaaccccaacgccaaccccgccgccuacaucaagcccggcuccgccaacaagcccaaggacgagcucgacuacgccaacgacaucgagaagaagaucugcaagauggagaagugcuccgccgccuacgagcccuccgacaagcacaucaaggaguaccucaacaagauccagaacucccucugaggacuagucccuguucccagagcccacuuuuuuuucuuuuuuugaaauaaaauagccugucuuucagaucucaaaggcucuuuucagagccaccaaaaaaaaaaaaaaaaaaaaaaaaaaaaaaaaaaaaaaaaaaaaaaaaaaaaaaaaaaaaaaaaaaaaaaaaaaaaaaaaaaaaaaaaaaaaaaaaaaaaa

SEQ ID NO: 9914 - RNA, 1398 nt, Artificial Sequence
  mRNA Design a-3 (hSL-A100) comprising derived and/or modified sequence from Pf(3D7)__XP_001351122.1__HsALB_Pf-CSP(19-272)_L(AAY)_Pf-CSP(346-3 75)_L(AAY)_Pf-CSP(310-327)_L(AAY)_PADRE (opt2)
aggagagggcgcuuggcuugcaaggacccugagcugcggcauugaagcacacccaacccaacucgacugaagucagccucacugaaccggaucugagaaucuucucucucugggcuugccagggcucuccgaaccuagcuagcauccucuucaauuccaacuagaaagcuuaccaugaagugggucaccuucaucucccuccucuuccucuucuccuccgccuacucccucuuccaggaguaccagugcuacggcuccuccuccaacacccgcguccucaacgagcucaacuacgacaacgccggcaccaaccucuacaacgagcucgagaugaacuacuacggcaagcaggagaacugguacucccucaagaagaacucccgcucccucggcgagaacgacgacggcaacaacgaggacaacgagaagcuccgcaagcccaagcacaagaagcucaagcagcccgccgacggcaaccccgaccccaacgccaaccccaacgucgaccccaacgccaaccccaacgucgaccccaacgccaaccccaacgucgaccccaacgccaaccccaacgccaaccccaacgccaaccccaacgccaaccccaacgccaaccccaacgccaaccccaacgccaaccccaacgccaaccccaacgccaaccccaacgccaaccccaacgccaaccccaacgccaaccccaacgccaaccccaacgccaaccccaacgccaaccccaacgccaaccccaacgccaaccccaacgucgaccccaacgccaaccccaacgccaaccccaacgccaaccccaacgccaaccccaacgccaaccccaacgccaaccccaacgccaaccccaacgccaaccccaacgccaaccccaacgccaaccccaacgccaaccccaacgccaaccccaacgccaaccccaacgccaaccccaacgccaaccccaacgccaaccccaacgccaaccccaacgccaaccccgccgccuacaucaagcccggcuccgccaacaagcccaaggacgagcucgacuacgccaacgacaucgagaagaagaucugcaagauggagaagugcuccgccgccuacgagcccuccgacaagcacaucaaggaguaccucaacaagauccagaacucccucgccgccuacgccaaguucgucgccgccuggacccucaaggccgccgccugaggacuagucccuguucccagagcccacuuuuuuuucuuuuuuugaaauaaaauagccugucuuucagaucucaaaggcucuuuucagagccaccaaaaaaaaaaaaaaaaaaaaaaaaaaaaaaaaaaaaaaaaaaaaaaaaaaaaaaaaaaaaaaaaaaaaaaaaaaaaaaaaaaaaaaaaaaaaaaaaaaaaa

SEQ ID NO: 9915 - RNA, 1398 nt, Artificial Sequence
  mRNA Design a-3 (hSL-A100) comprising derived and/or modified sequence from Pf(3D7)__XP_001351122.1__HsALB_Pf-CSP(19-272)_L(AAY)_Pf-CSP(310-3 27)_L(AAY)_Pf-CSP(346-375)_L(AAY)_PADRE (opt2)
aggagagggcgcuuggcuugcaaggacccugagcugcggcauugaagcacacccaacccaacucgacugaagucagccucacugaaccggaucugagaaucuucucucucugggcuugccagggcucuccgaaccuagcuagcauccucuucaauuccaacuagaaagcuuaccaugaagugggucaccuucaucucccuccucuuccucuucuccuccgccuacucccucuuccaggaguaccagugcuacggcuccuccuccaacacccgcguccucaacgagcucaacuacgacaacgccggcaccaaccucuacaacgagcucgagaugaacuacuacggcaagcaggagaacugguacucccucaagaagaacucccgcucccucggcgagaacgacgacggcaacaacgaggacaacgagaagcuccgcaagcccaagcacaagaagcucaagcagcccgccgacggcaaccccgaccccaacgccaaccccaacgucgaccccaacgccaaccccaacgucgaccccaacgccaaccccaacgucgaccccaacgccaaccccaacgccaaccccaacgccaaccccaacgccaaccccaacgccaaccccaacgccaaccccaacgccaaccccaacgccaaccccaacgccaaccccaacgccaaccccaacgccaaccccaacgccaaccccaacgccaaccccaacgccaaccccaacgccaaccccaacgccaaccccaacgccaaccccaacgucgaccccaacgccaaccccaacgccaaccccaacgccaaccccaacgccaaccccaacgccaaccccaacgccaaccccaacgccaaccccaacgccaaccccaacgccaaccccaacgccaaccccaacgccaaccccaacgccaaccccaacgccaaccccaacgccaaccccaacgccaaccccaacgccaaccccaacgccaaccccaacgccaaccccgccgccuacgagcccuccgacaagcacaucaaggaguaccucaacaagauccagaacucccucgccgccuacaucaagcccggcuccgccaacaagcccaaggacgagcucgacuacgccaacgacaucgagaagaagaucugcaagauggagaagugcuccgccgccuacgccaaguucgucgccgccuggacccucaaggccgccgccugaggacuagucccuguucccagagcccacuuuuuuuucuuuuuuugaaauaaaauagccugucuuucagaucucaaaggcucuuuucagagccaccaaaaaaaaaaaaaaaaaaaaaaaaaaaaaaaaaaaaaaaaaaaaaaaaaaaaaaaaaaaaaaaaaaaaaaaaaaaaaaaaaaaaaaaaaaaaaaaaaaaaa

SEQ ID NO: 9916 - RNA, 1452 nt, Artificial Sequence
  mRNA Design a-3 (hSL-A100) comprising derived and/or modified sequence from Pf(3D7)__XP_001351122.1__HsALB_Pf-CSP(19-272)_L(AAY)_Pf-CSP(310-3 27)_L(AAY)_Pf-CSP(346-375)_L(AAY)_PADRE_L(AAY)_P2 (opt2)
aggagagggcgcuuggcuugcaaggacccugagcugcggcauugaagcacacccaacccaacucgacugaagucagccucacugaaccggaucugagaaucuucucucucugggcuugccagggcucuccgaaccuagcuagcauccucuucaauuccaacuagaaagcuuaccaugaagugggucaccuucaucucccuccucuuccucuucuccuccgccuacucccucuuccaggaguaccagugcuacggcuccuccuccaacacccgcguccucaacgagcucaacuacgacaacgccggcaccaaccucuacaacgagcucgagaugaacuacuacggcaagcaggagaacugguacucccucaagaagaacucccgcucccucggcgagaacgacgacggcaacaacgaggacaacgagaagcuccgcaagcccaagcacaagaagcucaagcagcccgccgacggcaaccccgaccccaacgccaaccccaacgucgaccccaacgccaaccccaacgucgaccccaacgccaaccccaacgucgaccccaacgccaaccccaacgccaaccccaacgccaaccccaacgccaaccccaacgccaaccccaacgccaaccccaacgccaaccccaacgccaaccccaacgccaaccccaacgccaaccccaacgccaaccccaacgccaaccccaacgccaaccccaacgccaaccccaacgccaaccccaacgccaaccccaacgccaaccccaacgucgaccccaacgccaaccccaacgccaaccccaacgccaaccccaacgccaaccccaacgccaaccccaacgccaaccccaacgccaaccccaacgccaaccccaacgccaaccccaacgccaaccccaacgccaaccccaacgccaaccccaacgccaaccccaacgccaaccccaacgccaaccccaacgccaaccccaacgccaaccccaacgccaaccccgccgccuacgagcccuccgacaagcacaucaaggaguaccucaacaagauccagaacucccucgccgccuacaucaagcccggcuccgccaacaagcccaaggacgagcucgacuacgccaacgacaucgagaagaagaucugcaagauggagaagugcuccgccgccuacgccaaguucgucgccgccuggacccucaaggccgccgccgccgccuaccaguacaucaaggccaacuccaaguucaucggcaucaccgagcucugaggacuagucccuguucccagagcccacuuuuuuuucuuuuuuugaaauaaaauagccugucuuucagaucucaaaggcucuuuucagagccaccaaaaaaaaaaaaaaaaaaaaaaaaaaaaaaaaaaaaaaaaaaaaaaaaaaaaaaaaaaaaaaaaaaaaaaaaaaaaaaaaaaaaaaaaaaaaaaaaaaaaa

SEQ ID NO: 9917 - RNA, 1416 nt, Artificial Sequence
  mRNA Design a-3 (hSL-A100) comprising derived and/or modified sequence from Pf(3D7)__XP_001351122.1__HsALB_Pf-CSP(19-272)_L(AAY)_Pf-CSP(310-3 27)_Linker (AAY)_Pf-CSP(346-397) (opt2)
aggagagggcgcuuggcuugcaaggacccugagcugcggcauugaagcacacccaacccaacucgacugaagucagccucacugaaccggaucugagaaucuucucucucugggcuugccagggcucuccgaaccuagcuagcauccucuucaauuccaacuagaaagcuuaccaugaagugggucaccuucaucucccuccucuuccucuucuccuccgccuacucccucuuccaggaguaccagugcuacggcuccuccuccaacacccgcguccucaacgagcucaacuacgacaacgccggcaccaaccucuacaacgagcucgagaugaacuacuacggcaagcaggagaacugguacucccucaagaagaacucccgcucccucggcgagaacgacgacggcaacaacgaggacaacgagaagcuccgcaagcccaagcacaagaagcucaagcagcccgccgacggcaaccccgaccccaacgccaaccccaacgucgaccccaacgccaaccccaacgucgaccccaacgccaaccccaacgucgaccccaacgccaaccccaacgccaaccccaacgccaaccccaacgccaaccccaacgccaaccccaacgccaaccccaacgccaaccccaacgccaaccccaacgccaaccccaacgccaaccccaacgccaaccccaacgccaaccccaacgccaaccccaacgccaaccccaacgccaaccccaacgccaaccccaacgccaaccccaacgucgaccccaacgccaaccccaacgccaaccccaacgccaaccccaacgccaaccccaacgccaaccccaacgccaaccccaacgccaaccccaacgccaaccccaacgccaaccccaacgccaaccccaacgccaaccccaacgccaaccccaacgccaaccccaacgccaaccccaacgccaaccccaacgccaaccccaacgccaaccccaacgccaaccccgccgccuacgagcccuccgacaagcacaucaaggaguaccucaacaagauccagaacucccucgccgccuacaucaagcccggcuccgccaacaagcccaaggacgagcucgacuacgccaacgacaucgagaagaagaucugcaagauggagaagugcuccuccgucuucaacgucgucaacuccuccaucggccucaucaugguccucuccuuccucuuccucaacugaggacuagucccuguucccagagcccacuuuuuuuucuuuuuuugaaauaaaauagccugucuuucagaucucaaaggcucuuuucagagccaccaaaaaaaaaaaaaaaaaaaaaaaaaaaaaaaaaaaaaaaaaaaaaaaaaaaaaaaaaaaaaaaaaaaaaaaaaaaaaaaaaaaaaaaaaaaaaaaaaaaaa

SEQ ID NO: 9918 - RNA, 2016 nt, Artificial Sequence
  mRNA Design a-3 (hSL-A100) comprising derived and/or modified sequence from Pf(3D7)__XP_001351122.1__LumSynt_L(GGS4-GGG)_Pf-CSP(19-397) (opt3)
aggagagggcgcuuggcuugcaaggacccugagcugcggcauugaagcacacccaacccaacucgacugaagucagccucacugaaccggaucugagaaucuucucucucugggcuugccagggcucuccgaaccuagcuagcauccucuucaauuccaacuagaaagcuuaccaugcagaucuacgagggcaagcugaccgccgaagggcucagauucggaauuguggcuagcagguuuaaccacgcacuugucgaccggcugguugagggugccauagaugcgaucgugcgccauggcgggcgagaagaggacauuacauugguacgugugcccggauccugggaaaucccugucgcugccggcgaguuagcaagaaaagaggauauugacgccgugaucgcuauagguguucugaucaggggagcaacuccacacuucgauuauauugccucugaagugucaaaggggcuagcugaccucagucuggagcuucggaaaccgaucacguuuggcgucauuaccgccgauacacuggaacaagcgaucgagcgcgcaggcacuaagcaugggaauaaaggaugggaggccgcuuugagcgccauagaaauggcaaaccucuucaagucccugagagguggcucugggggaucgggcgguucagggggaagcggcggcgggcuguuucaggaguaccagugcuauggaaguuccucuaauaccagggugcucaacgaauuaaauuacgacaacgcugguacaaaucuguauaacgagcuugaaaugaauuacuauggcaagcaggagaacugguacagcuugaaaaagaacucccggucacugggggagaaugaugacggaaauaacgaagauaaugagaaacuacgcaagcccaaacacaagaagcucaaacaaccugccgacggcaacccagaucccaacgcgaauccuaacguagacccaaaugccaaccccaauguugacccuaacgcaaauccaaacguggauccgaaugcuaaccccaaugccaacccuaaugcuaacccaaaugccaaccccaacgcaaauccuaacgccaauccaaacgcuaaucccaacgcgaauccgaacgcaaauccuaacgccaaucccaacgcuaauccaaacgccaauccuaacgcaaaccccaaugccaacccaaaugcuaaccccaaugccaacccuaaugcaaacccaaaugucgacccgaacgcgaaucccaacgcuaauccuaacgccaauccaaacgcaaaccccaaugccaacccuaaugcuaacccaaaugccaaccccaaugcaaacccgaaugcuaacccuaaugccaacccaaaugcgaaccccaaugccaacccuaaugcuaaccccaacgcaaauccaaacgccaauccuaacgcuaaucccaacgccaauccaaacgcaaauccgaacaagaauaaccaggguaaugggcagggccauaacaugccuaaugaucccaaccgaaacguggacgaaaaugcgaacgccaauagugcugugaaaaacaauaacaaugaggaaccaagcgauaagcacauuaaagaguaccugaacaagauccaaaauucucuuuccaccgaguggucacccugcagcgucacuugcggaaacggcauucagguuagaaucaaaccugggagugccaauaagccaaaggacgaacuggauuaugcaaacgacaucgagaaaaagauuuguaaaauggaaaaguguucuuccguguucaauguagugaacagcucgauaggauugaucaugguccucucuuuucuguucuuaaauugaggacuagucccuguucccagagcccacuuuuuuuucuuuuuuugaaauaaaauagccugucuuucagaucucaaaggcucuuuucagagccaccaaaaaaaaaaaaaaaaaaaaaaaaaaaaaaaaaaaaaaaaaaaaaaaaaaaaaaaaaaaaaaaaaaaaaaaaaaaaaaaaaaaaaaaaaaaaaaaaaaaaa

SEQ ID NO: 9919 - RNA, 1878 nt, Artificial Sequence
  mRNA Design a-3 (hSL-A100) comprising derived and/or modified sequence from Pf(3D7)__XP_001351122.1__HsALB_Pf-CSP(19-272)_L(PVTN)_HBsAg (opt3)
aggagagggcgcuuggcuugcaaggacccugagcugcggcauugaagcacacccaacccaacucgacugaagucagccucacugaaccggaucugagaaucuucucucucugggcuugccagggcucuccgaaccuagcuagcauccucuucaauuccaacuagaaagcuuaccaugaagugggugaccuucaucagccugcucuuucuuuucuccucugccuacucacuguuucaggaguaucaaugcuacggcaguagcuccaacacaagagucuugaaugaauuaaacuaugacaaugcugggacuaaccuguacaaugagcuagaaaugaacuauuacggaaaacaggagaauugguauucucucaagaaaaacucgaggucacugggugaaaaugaugacggcaacaaugaggauaacgagaaacuucggaagcccaagcacaagaaacugaagcagccugcagacgggaauccagauccgaacgccaaucccaacguugacccuaacgcgaauccaaacguggaucccaaugcuaacccuaauguagacccaaacgccaaucccaacgcaaauccuaacgccaauccaaacgcuaauccgaacgcaaaucccaacgccaacccuaaugcuaacccaaaugccaaccccaaugcgaacccuaaugcaaacccaaaugccaaccccaaugcuaacccgaaugccaacccuaaugcaaaccccaacgcuaauccaaacgccaauccuaacgcgaaucccaacguggauccaaaugccaaccccaaugcaaacccuaaugcuaacccaaaugccaacccgaaugcuaaccccaacgccaauccuaacgcaaauccaaacgccaaucccaacgcuaauccuaacgcgaauccaaacgcaaaucccaacgccaauccgaacgcuaauccuaacgccaauccaaacgcaaaccccaaugccaacccuaaugcuaaccccaaugccaacccaccugucacgaauauggaaaacauuaccagcggauucuugggcccccuccuggugcugcaggcaggguuuuuccucuuaacacgcauacugacuaucccacaaagucuugacuccugguggaccucuuugaauuuucuggguggaagcccgguuugucuaggccagaacucccagucaccuacaaguaaucauagccccaccucuugcccacccauuuguccuggcuaccgauggaugugccuccguagauucaucauuuuucuguucauccuucuguugugucucauauuucuguuagugcugcucgauuaccaggggaugcuuccagucugcccccugaucccuggauccacuacaaccaacacggguccguguaaaacuugcaccacaccagcgcaaggcaauucaauguuccccagcuguugcuguacuaagccuaccgacgggaacugcacaugcauuccaauccccaguucuugggcuuuugccaaauauuugugggagugggcauccgugagguucagcuggcuaucgcugcucguaccuuucguucagugguuugugggacugucuccgaccgucuggcuuuccgccauuuggaugaugugguacuggggccccucacuguauaguaucgugagcccauucauaccuuugcuccccaucuuuuucugucuguggguguacauuugaggacuagucccuguucccagagcccacuuuuuuuucuuuuuuugaaauaaaauagccugucuuucagaucucaaaggcucuuuucagagccaccaaaaaaaaaaaaaaaaaaaaaaaaaaaaaaaaaaaaaaaaaaaaaaaaaaaaaaaaaaaaaaaaaaaaaaaaaaaaaaaaaaaaaaaaaaaaaaaaaaaaa

SEQ ID NO: 9920 - RNA, 1995 nt, Artificial Sequence
  mRNA Design a-3 (hSL-A100) comprising derived and/or modified sequence from Pf(3D7)__XP_001351122.1__HsALB_Pf-CSP(19-272)_L(AAY)_Pf-CSP(346-3 65)_L(AAY)_PADRE_L(PVTN)_HBsAg (opt3)
aggagagggcgcuuggcuugcaaggacccugagcugcggcauugaagcacacccaacccaacucgacugaagucagccucacugaaccggaucugagaaucuucucucucugggcuugccagggcucuccgaaccuagcuagcauccucuucaauuccaacuagaaagcuuaccaugaagugggugaccuucaucagccugcucuuucuuuucuccucugccuacucacuguuucaggaguaucaaugcuacggcaguagcuccaacacaagagucuugaaugaauuaaacuaugacaaugcugggacuaaccuguacaaugagcuagaaaugaacuauuacggaaaacaggagaauugguauucucucaagaaaaacucgaggucacugggugaaaaugaugacggcaacaaugaggauaacgagaaacuucggaagcccaagcacaagaaacugaagcagccugcagacgggaauccagauccgaacgccaaucccaacguugacccuaacgcgaauccaaacguggaucccaaugcuaacccuaauguagacccaaacgccaaucccaacgcaaauccuaacgccaauccaaacgcuaauccgaacgcaaaucccaacgccaacccuaaugcuaacccaaaugccaaccccaaugcgaacccuaaugcaaacccaaaugccaaccccaaugcuaacccgaaugccaacccuaaugcaaaccccaacgcuaauccaaacgccaauccuaacgcgaaucccaacguggauccaaaugccaaccccaaugcaaacccuaaugcuaacccaaaugccaacccgaaugcuaaccccaacgccaauccuaacgcaaauccaaacgccaaucccaacgcuaauccuaacgcgaauccaaacgcaaaucccaacgccaauccgaacgcuaauccuaacgccaauccaaacgcaaaccccaaugccaacccuaaugcuaaccccaaugccaacccagcagcguacauuaaaccuggaagcgcuaauaagcccaaagacgaauuggauuacgccaacgacauagaggcagccuaugcuaaguucgucgccgcauggacgcucaaggcugccgcgccagugaccaauauggaaaacaucacaaguggcuuucuggguccgcugcucguuuuacaggccggguucuuucugcuuacucgcauuuugaccaucccucaaucccuggauucuugguggacaagccuaaauuuccucggaggcucccccgugugucugggccagaacucacagaguccaaccagcaaucauucucccacuuccugcccuccaauuugucccggguaccgauggaugugccuucguagauuuaucauauuccuguuuaucuugcuccuguguuuaauuuuccugcucguccuucuggacuaucagggaauguugccugugugcccgcuaaucccagguucaacaaccacgaacacuggccccuguaaaaccugcacaacuccugcucaagggaauagcauguuuccaaguuguugcuguaccaagcccacagacggaaacuguaccugcauuccuaucccgucuuccugggcauucgccaaauaccugugggagugggcuagcguaagguucucguggcucucucugcuuguucccuuugugcagugguucgucggccuguccccaacggugugguugucagccauauggaugaugugguauugggguccuagucucuacagcauugugucccccuuuaucccacuguuaccuauuuucuuuugccugugggucuauaucugaggacuagucccuguucccagagcccacuuuuuuuucuuuuuuugaaauaaaauagccugucuuucagaucucaaaggcucuuuucagagccaccaaaaaaaaaaaaaaaaaaaaaaaaaaaaaaaaaaaaaaaaaaaaaaaaaaaaaaaaaaaaaaaaaaaaaaaaaaaaaaaaaaaaaaaaaaaaaaaaaaaaa

SEQ ID NO: 9921 - RNA, 2214 nt, Artificial Sequence
  mRNA Design a-3 (hSL-A100) comprising derived and/or modified sequence from Pf(3D7)__XP_001351122.1__HsALB_Pf-CSP(19-384)_L(PVTN)_HBsAg (opt3)
aggagagggcgcuuggcuugcaaggacccugagcugcggcauugaagcacacccaacccaacucgacugaagucagccucacugaaccggaucugagaaucuucucucucugggcuugccagggcucuccgaaccuagcuagcauccucuucaauuccaacuagaaagcuuaccaugaagugggugaccuucaucagccugcucuuucuuuucuccucugccuacucacuguuucaggaguaucaaugcuacggcaguagcuccaacacaagagucuugaaugaauuaaacuaugacaaugcugggacuaaccuguacaaugagcuagaaaugaacuauuacggaaaacaggagaauugguauucucucaagaaaaacucgaggucacugggugaaaaugaugacggcaacaaugaggauaacgagaaacuucggaagcccaagcacaagaaacugaagcagccugcagacgggaauccagauccgaacgccaaucccaacguugacccuaacgcgaauccaaacguggaucccaaugcuaacccuaauguagacccaaacgccaaucccaacgcaaauccuaacgccaauccaaacgcuaauccgaacgcaaaucccaacgccaacccuaaugcuaacccaaaugccaaccccaaugcgaacccuaaugcaaacccaaaugccaaccccaaugcuaacccgaaugccaacccuaaugcaaaccccaacgcuaauccaaacgccaauccuaacgcgaaucccaacguggauccaaaugccaaccccaaugcaaacccuaaugcuaacccaaaugccaacccgaaugcuaaccccaacgccaauccuaacgcaaauccaaacgccaaucccaacgcuaauccuaacgcgaauccaaacgcaaaucccaacgccaauccgaacgcuaauccuaacgccaauccaaacgcaaaccccaaugccaacccuaaugcuaaccccaaugccaacccaaauaaaaacaaucagggaaacggccaaggucauaauaugccuaacgaccccaaucgcaacgucgaugaaaaugcaaacgcgaacagcgcugugaagaauaacaauaacgaggaaccaagugacaaacacauuaaggaguacuugaauaagauacagaacucccucucuacggaguggagcccguguuccguuaccugcgggaauggaauccaggugcgaauuaaaccuggcucagccaacaagcccaaagaugaacuggacuacgcaaaugacaucgagaagaaaauuuguaagauggaaaaaugcaguagcgucuucaacgugguaaauucuuccccaguuacaaacauggagaauaucacuucaggcuuucuggggccccucuuagugcugcaggccggauucuuucuuuugacccguauacugacaaucccucaaagccuagauaguugguggaccucucucaacuuccuggguggcuccccagucugucuugggcagaauagccagucgcccacuucuaaccauuccccuacaucaugcccgccaauuugucccggauauagauggaugugccugaggcgguuuaucauuuucuuguuuauccuccuguuaugucugauauuccuccuugugcuguuggacuaccagggcaugcuaccugugugcccacugauucccgguaguaccacgacuaacaccgggccuuguaagacaugcacuaccccggcucaaggaaauagcauguuucccuccugcuguugcacaaagccaaccgauggcaacuguacgugcaucccuauucccucuagcugggccuucgcaaaauaucucugggaaugggcuucaguccgcuucaguuggcugucccuucugguuccauuugugcagugguucguaggcuugagcccuacuguguggcucucugccaucuggaugaugugguacugggggcccucacuguauaguaucgucagcccauuuauuccguuacugccuauauucuuuugucuauggguguacaucugaggacuagucccuguucccagagcccacuuuuuuuucuuuuuuugaaauaaaauagccugucuuucagaucucaaaggcucuuuucagagccaccaaaaaaaaaaaaaaaaaaaaaaaaaaaaaaaaaaaaaaaaaaaaaaaaaaaaaaaaaaaaaaaaaaaaaaaaaaaaaaaaaaaaaaaaaaaaaaaaaaaaa

SEQ ID NO: 9922 - RNA, 2031 nt, Artificial Sequence
  mRNA Design a-3 (hSL-A100) comprising derived and/or modified sequence from Pf(3D7)__XP_001351122.1__HsALB_Pf-CSP(19-384)_L(SGG)_Ferritin (opt3)
aggagagggcgcuuggcuugcaaggacccugagcugcggcauugaagcacacccaacccaacucgacugaagucagccucacugaaccggaucugagaaucuucucucucugggcuugccagggcucuccgaaccuagcuagcauccucuucaauuccaacuagaaagcuuaccaugaagugggugaccuucaucagccugcucuuucuuuucuccucugccuacucacuguuucaggaguaucaaugcuacggcaguagcuccaacacaagagucuugaaugaauuaaacuaugacaaugcugggacuaaccuguacaaugagcuagaaaugaacuauuacggaaaacaggagaauugguauucucucaagaaaaacucgaggucacugggugaaaaugaugacggcaacaaugaggauaacgagaaacuucggaagcccaagcacaagaaacugaagcagccugcagacgggaauccagauccgaacgccaaucccaacguugacccuaacgcgaauccaaacguggaucccaaugcuaacccuaauguagacccaaacgccaaucccaacgcaaauccuaacgccaauccaaacgcuaauccgaacgcaaaucccaacgccaacccuaaugcuaacccaaaugccaaccccaaugcgaacccuaaugcaaacccaaaugccaaccccaaugcuaacccgaaugccaacccuaaugcaaaccccaacgcuaauccaaacgccaauccuaacgcgaaucccaacguggauccaaaugccaaccccaaugcaaacccuaaugcuaacccaaaugccaacccgaaugcuaaccccaacgccaauccuaacgcaaauccaaacgccaaucccaacgcuaauccuaacgcgaauccaaacgcaaaucccaacgccaauccgaacgcuaauccuaacgccaauccaaacgcaaaccccaaugccaacccuaaugcuaaccccaaugccaacccaaauaaaaacaaucagggaaacggccaaggucauaauaugccuaacgaccccaaucgcaacgucgaugaaaaugcaaacgcgaacagcgcugugaagaauaacaauaacgaggaaccaagugacaaacacauuaaggaguacuugaauaagauacagaacucccucucuacggaguggagcccguguuccguuaccugcgggaauggaauccaggugcgaauuaaaccuggcucagccaacaagcccaaagaugaacuggacuacgcaaaugacaucgagaagaaaauuuguaagauggaaaaaugcaguagcgucuucaacgugguaaauucuuccucaggcgggcugagcaaggauaucauaaagcucuuaaacgagcagguuaauaaagaaaugaacaguucuaaucuguauauguccaugagcucgugguguuacacacauucucuugacggagccgguuuguuucuguucgaucacgcugccgaggaguaugaacaugcaaagaaacuaaucauuuuucucaacgagaacaaugugccaguccaacugacuuccaucucagcucccgaacacaaguucgagggccuuacccagauuuuucagaaagccuacgaacacgagcagcauaucagugagagcauaaacaauauuguggaccacgcgaucaaguccaaggaucaugccacauucaacuuucugcaaugguauguggcugaacagcacgaggaagaggucuuguucaaagacauucucgauaagaucgaacugaucgggaaugagaaccacggauuauaccuggcagaccaguauguuaaaggcauugccaagucucguaaaagcugaggacuagucccuguucccagagcccacuuuuuuuucuuuuuuugaaauaaaauagccugucuuucagaucucaaaggcucuuuucagagccaccaaaaaaaaaaaaaaaaaaaaaaaaaaaaaaaaaaaaaaaaaaaaaaaaaaaaaaaaaaaaaaaaaaaaaaaaaaaaaaaaaaaaaaaaaaaaaaaaaaaaa

SEQ ID NO: 9923 - RNA, 1992 nt, Artificial Sequence
  mRNA Design a-3 (hSL-A100) comprising derived and/or modified sequence from Pf(3D7)__XP_001351122.1__HsALB_Pf-CSP(93-384)_L(PVTN)_HBsAg (opt3)
aggagagggcgcuuggcuugcaaggacccugagcugcggcauugaagcacacccaacccaacucgacugaagucagccucacugaaccggaucugagaaucuucucucucugggcuugccagggcucuccgaaccuagcuagcauccucuucaauuccaacuagaaagcuuaccaugaagugggugaccuucaucagccugcucuuucuuuucuccucugccuacucaaaacugaagcagcccgcugacggcaacccugauccaaaugcaaacccgaaugucgaccccaacgccaauccuaacguugauccaaaugcgaaccccaauguggacccuaacgcuaauccaaacgccaaucccaacgcaaauccuaacgccaacccaaaugcuaacccgaaugcaaaccccaaugccaacccuaaugcuaacccaaaugccaaccccaaugcgaacccuaaugcaaacccaaaugccaaccccaacgcuaauccgaacgccaauccuaacgcaaaucccaacgcuaauccaaacgccaauccuaacguagaucccaaugcgaacccaaaugccaaccccaaugcaaacccuaacgcuaauccaaacgccaauccgaacgcuaaucccaacgccaauccuaacgcaaauccaaacgccaaucccaacgcuaauccuaacgcgaauccaaacgcaaaccccaaugccaacccgaaugcuaacccuaaugccaacccaaaugcaaaccccaaugccaacccuaaugcuaaccccaauaaaaacaaucaagggaacggacagggucacaauaugccaaacgacccuaacagaaauguggaugagaacgccaaugcaaacagugcggucaagaauaacaauaacgaggaacccagcgacaaacauauuaaggaauauuugaauaagauacagaacuccuuaucuacagaguggucgccaugcucagugacuuguggcaaugggauccagguuaggauuaaaccgggaagcgcuaacaagccuaaagaugaacuggacuacgccaaugauaucgagaagaaaauuugcaagauggagaaguguaguuccguguuuaacgucguaaauucuagccccgugacgaacauggaaaacaucaccuccggcuuccuagguccacuccugguucuucaagcaggguuuuuccuguugacacggauacucacuaucccccagucacuggacaguugguggaccagccugaauuuucucggaggcucuccugugugcuuaggccagaacucccagucaccaacaagcaaucacagucccaccucuuguccuccgauuugcccaggguaucgcuggaugugucugcgacguuucaucauuuuucuuuucaucuugcugcuaugccucauauuucugcuuguccuguuggauuaccaaggaaugcuccccguguguccucugauuccagguuccacuacaaccaacacgggccccugcaaaacuuguaccacuccugcccaggggaauagcauguucccgucgugcugcuguacaaagcccaccgacggaaacugcacauguaucccaauuccuucuuccugggcuuuugccaaauauuuaugggagugggcaucagugagauucaguuggcugagccuccuuguccccuucguucagugguuugugggccuguccccaaccguaugguugucugcuaucuggaugaugugguacugggguccuagccuauauucaaucgugagucccuucauuccacugcucccgauauuuuucugccugugggucuacaucugaggacuagucccuguucccagagcccacuuuuuuuucuuuuuuugaaauaaaauagccugucuuucagaucucaaaggcucuuuucagagccaccaaaaaaaaaaaaaaaaaaaaaaaaaaaaaaaaaaaaaaaaaaaaaaaaaaaaaaaaaaaaaaaaaaaaaaaaaaaaaaaaaaaaaaaaaaaaaaaaaaaaa

SEQ ID NO: 9924 - RNA, 1653 nt, Artificial Sequence; identical to SEQ ID NO: 8378
  mRNA Design a-3 (hSL-A100) comprising derived and/or modified sequence from Pf(3D7)__XP_001351122.1__HsALB_Pf-CSP(199-377)_L(PVTN)_HBsAg (opt3)

SEQ ID NO: 9925 - RNA, 1350 nt, Artificial Sequence
  mRNA Design a-3 (hSL-A100) comprising derived and/or modified sequence from Pf(3D7)__XP_001351122.1__HsALB_Pf-CSP(19-272)_L(AAY)_Pf-CSP(346-3 75)_L(AAY)_Pf-CSP(310-327) (opt3)
aggagagggcgcuuggcuugcaaggacccugagcugcggcauugaagcacacccaacccaacucgacugaagucagccucacugaaccggaucugagaaucuucucucucugggcuugccagggcucuccgaaccuagcuagcauccucuucaauuccaacuagaaagcuuaccaugaagugggugaccuucaucagccugcucuuucuuuucuccucugccuacucacuguuucaggaguaucaaugcuacggcaguagcuccaacacaagagucuugaaugaauuaaacuaugacaaugcugggacuaaccuguacaaugagcuagaaaugaacuauuacggaaaacaggagaauugguauucucucaagaaaaacucgaggucacugggugaaaaugaugacggcaacaaugaggauaacgagaaacuucggaagcccaagcacaagaaacugaagcagccugcagacgggaauccagauccgaacgccaaucccaacguugacccuaacgcgaauccaaacguggaucccaaugcuaacccuaauguagacccaaacgccaaucccaacgcaaauccuaacgccaauccaaacgcuaauccgaacgcaaaucccaacgccaacccuaaugcuaacccaaaugccaaccccaaugcgaacccuaaugcaaacccaaaugccaaccccaaugcuaacccgaaugccaacccuaaugcaaaccccaacgcuaauccaaacgccaauccuaacgcgaaucccaacguggauccaaaugccaaccccaaugcaaacccuaaugcuaacccaaaugccaacccgaaugcuaaccccaacgccaauccuaacgcaaauccaaacgccaaucccaacgcuaauccuaacgcgaauccaaacgcaaaucccaacgccaauccgaacgcuaauccuaacgccaauccaaacgcaaaccccaaugccaacccuaaugcuaaccccaaugccaacccagcagcguacauuaaaccuggaagcgcuaauaagcccaaagacgaauuggauuacgccaacgacauagagaagaagaucuguaaaauggaaaagugcagugcagccuaugagccauccgauaaacauauuaaggaguaccucaauaaaauccagaacucucugugaggacuagucccuguucccagagcccacuuuuuuuucuuuuuuugaaauaaaauagccugucuuucagaucucaaaggcucuuuucagagccaccaaaaaaaaaaaaaaaaaaaaaaaaaaaaaaaaaaaaaaaaaaaaaaaaaaaaaaaaaaaaaaaaaaaaaaaaaaaaaaaaaaaaaaaaaaaaaaaaaaaaa

SEQ ID NO: 9926 - RNA, 1398 nt, Artificial Sequence
  mRNA Design a-3 (hSL-A100) comprising derived and/or modified sequence from Pf(3D7)__XP_001351122.1__HsALB_Pf-CSP(19-272)_L(AAY)_Pf-CSP(346-3 75)_L(AAY)_Pf-CSP(310-327)_L(AAY)_PADRE (opt3)
aggagagggcgcuuggcuugcaaggacccugagcugcggcauugaagcacacccaacccaacucgacugaagucagccucacugaaccggaucugagaaucuucucucucugggcuugccagggcucuccgaaccuagcuagcauccucuucaauuccaacuagaaagcuuaccaugaagugggugaccuucaucagccugcucuuucuuuucuccucugccuacucacuguuucaggaguaucaaugcuacggcaguagcuccaacacaagagucuugaaugaauuaaacuaugacaaugcugggacuaaccuguacaaugagcuagaaaugaacuauuacggaaaacaggagaauugguauucucucaagaaaaacucgaggucacugggugaaaaugaugacggcaacaaugaggauaacgagaaacuucggaagcccaagcacaagaaacugaagcagccugcagacgggaauccagauccgaacgccaaucccaacguugacccuaacgcgaauccaaacguggaucccaaugcuaacccuaauguagacccaaacgccaaucccaacgcaaauccuaacgccaauccaaacgcuaauccgaacgcaaaucccaacgccaacccuaaugcuaacccaaaugccaaccccaaugcgaacccuaaugcaaacccaaaugccaaccccaaugcuaacccgaaugccaacccuaaugcaaaccccaacgcuaauccaaacgccaauccuaacgcgaaucccaacguggauccaaaugccaaccccaaugcaaacccuaaugcuaacccaaaugccaacccgaaugcuaaccccaacgccaauccuaacgcaaauccaaacgccaaucccaacgcuaauccuaacgcgaauccaaacgcaaaucccaacgccaauccgaacgcuaauccuaacgccaauccaaacgcaaaccccaaugccaacccuaaugcuaaccccaaugccaacccagcagcguacauuaaaccuggaagcgcuaauaagcccaaagacgaauuggauuacgccaacgacauagagaagaagaucuguaaaauggaaaagugcagugcagccuaugagccauccgauaaacauauuaaggaguaccucaauaaaauccagaacucucuggcugccuaugcaaaguucgucgcugccuggacgcugaaagcggccgcuugaggacuagucccuguucccagagcccacuuuuuuuucuuuuuuugaaauaaaauagccugucuuucagaucucaaaggcucuuuucagagccaccaaaaaaaaaaaaaaaaaaaaaaaaaaaaaaaaaaaaaaaaaaaaaaaaaaaaaaaaaaaaaaaaaaaaaaaaaaaaaaaaaaaaaaaaaaaaaaaaaaaaa

SEQ ID NO: 9927 - RNA, 1398 nt, Artificial Sequence
  mRNA Design a-3 (hSL-A100) comprising derived and/or modified sequence from Pf(3D7)__XP_001351122.1__HsALB_Pf-CSP(19-272)_L(AAY)_Pf-CSP(310-3 27)_L(AAY)_Pf-CSP(346-375)_L(AAY)_PADRE (opt3)
aggagagggcgcuuggcuugcaaggacccugagcugcggcauugaagcacacccaacccaacucgacugaagucagccucacugaaccggaucugagaaucuucucucucugggcuugccagggcucuccgaaccuagcuagcauccucuucaauuccaacuagaaagcuuaccaugaagugggugaccuucaucagccugcucuuucuuuucuccucugccuacucacuguuucaggaguaucaaugcuacggcaguagcuccaacacaagagucuugaaugaauuaaacuaugacaaugcugggacuaaccuguacaaugagcuagaaaugaacuauuacggaaaacaggagaauugguauucucucaagaaaaacucgaggucacugggugaaaaugaugacggcaacaaugaggauaacgagaaacuucggaagcccaagcacaagaaacugaagcagccugcagacgggaauccagauccgaacgccaaucccaacguugacccuaacgcgaauccaaacguggaucccaaugcuaacccuaauguagacccaaacgccaaucccaacgcaaauccuaacgccaauccaaacgcuaauccgaacgcaaaucccaacgccaacccuaaugcuaacccaaaugccaaccccaaugcgaacccuaaugcaaacccaaaugccaaccccaaugcuaacccgaaugccaacccuaaugcaaaccccaacgcuaauccaaacgccaauccuaacgcgaaucccaacguggauccaaaugccaaccccaaugcaaacccuaaugcuaacccaaaugccaacccgaaugcuaaccccaacgccaauccuaacgcaaauccaaacgccaaucccaacgcuaauccuaacgcgaauccaaacgcaaaucccaacgccaauccgaacgcuaauccuaacgccaauccaaacgcaaaccccaaugccaacccuaaugcuaaccccaaugccaacccagcagcguacgaaccuagcgacaaacauauuaaggaguacuugaauaaaauacagaacagucucgcugccuauaucaagcccggauccgcaaauaagccaaaagaugaacuggacuacgccaacgauauugagaagaaaaucuguaagauggagaaaugcucugcugccuaugcaaaguucgucgcugccuggacgcugaaagcggccgcuugaggacuagucccuguucccagagcccacuuuuuuuucuuuuuuugaaauaaaauagccugucuuucagaucucaaaggcucuuuucagagccaccaaaaaaaaaaaaaaaaaaaaaaaaaaaaaaaaaaaaaaaaaaaaaaaaaaaaaaaaaaaaaaaaaaaaaaaaaaaaaaaaaaaaaaaaaaaaaaaaaaaaa

SEQ ID NO: 9928 - RNA, 1452 nt, Artificial Sequence
  mRNA Design a-3 (hSL-A100) comprising derived and/or modified sequence from Pf(3D7)__XP_001351122.1__HsALB_Pf-CSP(19-272)_L(AAY)_Pf-CSP(310-3 27)_L(AAY)_Pf-CSP(346-375)_L(AAY)_PADRE_L(AAY)_P2 (opt3)
aggagagggcgcuuggcuugcaaggacccugagcugcggcauugaagcacacccaacccaacucgacugaagucagccucacugaaccggaucugagaaucuucucucucugggcuugccagggcucuccgaaccuagcuagcauccucuucaauuccaacuagaaagcuuaccaugaagugggugaccuucaucagccugcucuuucuuuucuccucugccuacucacuguuucaggaguaucaaugcuacggcaguagcuccaacacaagagucuugaaugaauuaaacuaugacaaugcugggacuaaccuguacaaugagcuagaaaugaacuauuacggaaaacaggagaauugguauucucucaagaaaaacucgaggucacugggugaaaaugaugacggcaacaaugaggauaacgagaaacuucggaagcccaagcacaagaaacugaagcagccugcagacgggaauccagauccgaacgccaaucccaacguugacccuaacgcgaauccaaacguggaucccaaugcuaacccuaauguagacccaaacgccaaucccaacgcaaauccuaacgccaauccaaacgcuaauccgaacgcaaaucccaacgccaacccuaaugcuaacccaaaugccaaccccaaugcgaacccuaaugcaaacccaaaugccaaccccaaugcuaacccgaaugccaacccuaaugcaaaccccaacgcuaauccaaacgccaauccuaacgcgaaucccaacguggauccaaaugccaaccccaaugcaaacccuaaugcuaacccaaaugccaacccgaaugcuaaccccaacgccaauccuaacgcaaauccaaacgccaaucccaacgcuaauccuaacgcgaauccaaacgcaaaucccaacgccaauccgaacgcuaauccuaacgccaauccaaacgcaaaccccaaugccaacccuaaugcuaaccccaaugccaacccagcagcguacgaaccuagcgacaaacauauuaaggaguacuugaauaaaauacagaacagucucgcugccuauaucaagcccggauccgcaaauaagccaaaagaugaacuggacuacgccaacgauauugagaagaaaaucuguaagauggagaaaugcucugcugccuaugcaaaguucgucgcugccuggacgcugaaagcggccgcugcagccuaccaauauauuaaggcuaauagcaaguuuaucggcauaaccgaacucugaggacuagucccuguucccagagcccacuuuuuuuucuuuuuuugaaauaaaauagccugucuuucagaucucaaaggcucuuuucagagccaccaaaaaaaaaaaaaaaaaaaaaaaaaaaaaaaaaaaaaaaaaaaaaaaaaaaaaaaaaaaaaaaaaaaaaaaaaaaaaaaaaaaaaaaaaaaaaaaaaaaaa

SEQ ID NO: 9929 - RNA, 1416 nt, Artificial Sequence
  mRNA Design a-3 (hSL-A100) comprising derived and/or modified sequence from Pf(3D7)__XP_001351122.1__HsALB_Pf-CSP(19-272)_L(AAY)_Pf-CSP(310-3 27)_Linker (AAY)_Pf-CSP(346-397) (opt3)
aggagagggcgcuuggcuugcaaggacccugagcugcggcauugaagcacacccaacccaacucgacugaagucagccucacugaaccggaucugagaaucuucucucucugggcuugccagggcucuccgaaccuagcuagcauccucuucaauuccaacuagaaagcuuaccaugaagugggugaccuucaucagccugcucuuucuuuucuccucugccuacucacuguuucaggaguaucaaugcuacggcaguagcuccaacacaagagucuugaaugaauuaaacuaugacaaugcugggacuaaccuguacaaugagcuagaaaugaacuauuacggaaaacaggagaauugguauucucucaagaaaaacucgaggucacugggugaaaaugaugacggcaacaaugaggauaacgagaaguuacggaaacccaagcacaagaaacugaagcagccugcagacgggaauccagauccgaacgccaaucccaacguugacccuaacgcgaauccaaacguggaucccaaugcuaacccuaauguagacccaaacgccaaucccaacgcaaauccuaacgccaauccaaacgcuaauccgaacgcaaaucccaacgccaacccuaaugcuaacccaaaugccaaccccaaugcgaacccuaaugcaaacccaaaugccaaccccaaugcuaacccgaaugccaacccuaaugcaaaccccaacgcuaauccaaacgccaauccuaacgcgaaucccaacguggauccaaaugccaaccccaaugcaaacccuaaugcuaacccaaaugccaacccgaaugcuaaccccaacgccaauccuaacgcaaauccaaacgccaaucccaacgcuaauccuaacgcgaauccaaacgcaaaucccaacgccaauccgaacgcuaauccuaacgccaauccaaacgcaaaccccaaugccaacccuaaugcuaaccccaaugccaacccagcagcguacgaaccuagcgacaaacauauuaaggaguacuugaauaaaauacagaacagucucgcugccuauaucaagcccggauccgcaaauaagccaaaagaugaacuggacuacgccaacgauauugagaagaaaaucuguaagauggagaaaugcucuagcgucuucaaugugguuaacuccucaauuggccugaucauggugcucaguuuucuuuuccugaauugaggacuagucccuguucccagagcccacuuuuuuuucuuuuuuugaaauaaaauagccugucuuucagaucucaaaggcucuuuucagagccaccaaaaaaaaaaaaaaaaaaaaaaaaaaaaaaaaaaaaaaaaaaaaaaaaaaaaaaaaaaaaaaaaaaaaaaaaaaaaaaaaaaaaaaaaaaaaaaaaaaaaa

SEQ ID NO: 9930 - RNA, 2016 nt, Artificial Sequence
  mRNA Design a-3 (hSL-A100) comprising derived and/or modified sequence from Pf(3D7)__XP_001351122.1__LumSynt_L(GGS4-GGG)_Pf-CSP(19-397) (opt4)
aggagagggcgcuuggcuugcaaggacccugagcugcggcauugaagcacacccaacccaacucgacugaagucagccucacugaaccggaucugagaaucuucucucucugggcuugccagggcucuccgaaccuagcuagcauccucuucaauuccaacuagaaagcuuaccaugcagaucuacgagggcaagcugaccgccgagggccugagauucggcaucguggccagcagauucaaccacgcccugguggacagacugguggagggcgccaucgacgccaucgugagacacggcggcagagaggaggacaucacccuggugagagugcccggcagcugggagauccccguggccgccggcgagcuggccagaaaggaggacaucgacgccgugaucgccaucggcgugcugaucagaggcgccaccccccacuucgacuacaucgccagcgaggugagcaagggccuggccgaccugagccuggagcugagaaagcccaucaccuucggcgugaucaccgccgacacccuggagcaggccaucgagagagccggcaccaagcacggcaacaagggcugggaggccgcccugagcgccaucgagauggccaaccuguucaagagccugagaggcggcagcggcggcagcggcggcagcggcggcagcggcggcggccuguuccaggaguaccagugcuacggcagcagcagcaacaccagagugcugaacgagcugaacuacgacaacgccggcaccaaccuguacaacgagcuggagaugaacuacuacggcaagcaggagaacugguacagccugaagaagaacagcagaagccugggcgagaacgacgacggcaacaacgaggacaacgagaagcugagaaagcccaagcacaagaagcugaagcagcccgccgacggcaaccccgaccccaacgccaaccccaacguggaccccaacgccaaccccaacguggaccccaacgccaaccccaacguggaccccaacgccaaccccaacgccaaccccaacgccaaccccaacgccaaccccaacgccaaccccaacgccaaccccaacgccaaccccaacgccaaccccaacgccaaccccaacgccaaccccaacgccaaccccaacgccaaccccaacgccaaccccaacgccaaccccaacgccaaccccaacgccaaccccaacgccaaccccaacguggaccccaacgccaaccccaacgccaaccccaacgccaaccccaacgccaaccccaacgccaaccccaacgccaaccccaacgccaaccccaacgccaaccccaacgccaaccccaacgccaaccccaacgccaaccccaacgccaaccccaacgccaaccccaacgccaaccccaacgccaaccccaacgccaaccccaacgccaaccccaacgccaaccccaacaagaacaaccagggcaacggccagggccacaacaugcccaacgaccccaacagaaacguggacgagaacgccaacgccaacagcgccgugaagaacaacaacaacgaggagcccagcgacaagcacaucaaggaguaccugaacaagauccagaacagccugagcaccgaguggagccccugcagcgugaccugcggcaacggcauccaggugagaaucaagcccggcagcgccaacaagcccaaggacgagcuggacuacgccaacgacaucgagaagaagaucugcaagauggagaagugcagcagcguguucaacguggugaacagcagcaucggccugaucauggugcugagcuuccuguuccugaacugaggacuagucccuguucccagagcccacuuuuuuuucuuuuuuugaaauaaaauagccugucuuucagaucucaaaggcucuuuucagagccaccaaaaaaaaaaaaaaaaaaaaaaaaaaaaaaaaaaaaaaaaaaaaaaaaaaaaaaaaaaaaaaaaaaaaaaaaaaaaaaaaaaaaaaaaaaaaaaaaaaaaa

SEQ ID NO: 9931 - RNA, 1878 nt, Artificial Sequence
  mRNA Design a-3 (hSL-A100) comprising derived and/or modified sequence from Pf(3D7)__XP_001351122.1__HsALB_Pf-CSP(19-272)_L(PVTN)_HBsAg (opt4)
aggagagggcgcuuggcuugcaaggacccugagcugcggcauugaagcacacccaacccaacucgacugaagucagccucacugaaccggaucugagaaucuucucucucugggcuugccagggcucuccgaaccuagcuagcauccucuucaauuccaacuagaaagcuuaccaugaagugggugaccuucaucagccugcuguuccuguucagcagcgccuacagccuguuccaggaguaccagugcuacggcagcagcagcaacaccagagugcugaacgagcugaacuacgacaacgccggcaccaaccuguacaacgagcuggagaugaacuacuacggcaagcaggagaacugguacagccugaagaagaacagcagaagccugggcgagaacgacgacggcaacaacgaggacaacgagaagcugagaaagcccaagcacaagaagcugaagcagcccgccgacggcaaccccgaccccaacgccaaccccaacguggaccccaacgccaaccccaacguggaccccaacgccaaccccaacguggaccccaacgccaaccccaacgccaaccccaacgccaaccccaacgccaaccccaacgccaaccccaacgccaaccccaacgccaaccccaacgccaaccccaacgccaaccccaacgccaaccccaacgccaaccccaacgccaaccccaacgccaaccccaacgccaaccccaacgccaaccccaacgccaaccccaacgccaaccccaacguggaccccaacgccaaccccaacgccaaccccaacgccaaccccaacgccaaccccaacgccaaccccaacgccaaccccaacgccaaccccaacgccaaccccaacgccaaccccaacgccaaccccaacgccaaccccaacgccaaccccaacgccaaccccaacgccaaccccaacgccaaccccaacgccaaccccaacgccaaccccaacgccaacccccccgugaccaacauggagaacaucaccagcggcuuccugggcccccugcuggugcugcaggccggcuucuuccugcugaccagaauccugaccaucccccagagccuggacagcugguggaccagccugaacuuccugggcggcagccccgugugccugggccagaacagccagagccccaccagcaaccacagccccaccagcugcccccccaucugccccggcuacagauggaugugccugagaagauucaucaucuuccuguucauccugcugcugugccugaucuuccugcuggugcugcuggacuaccagggcaugcugcccgugugcccccugauccccggcagcaccaccaccaacaccggccccugcaagaccugcaccacccccgcccagggcaacagcauguuccccagcugcugcugcaccaagcccaccgacggcaacugcaccugcauccccauccccagcagcugggccuucgccaaguaccugugggagugggccagcgugagauucagcuggcugagccugcuggugcccuucgugcagugguucgugggccugagccccaccguguggcugagcgccaucuggaugaugugguacuggggccccagccuguacagcaucgugagccccuucaucccccugcugcccaucuucuucugccuguggguguacaucugaggacuagucccuguucccagagcccacuuuuuuuucuuuuuuugaaauaaaauagccugucuuucagaucucaaaggcucuuuucagagccaccaaaaaaaaaaaaaaaaaaaaaaaaaaaaaaaaaaaaaaaaaaaaaaaaaaaaaaaaaaaaaaaaaaaaaaaaaaaaaaaaaaaaaaaaaaaaaaaaaaaaa

SEQ ID NO: 9932 - RNA, 1995 nt, Artificial Sequence
  mRNA Design a-3 (hSL-A100) comprising derived and/or modified sequence from Pf(3D7)__XP_001351122.1__HsALB_Pf-CSP(19-272)_L(AAY)_Pf-CSP(346-3 65)_L(AAY)_PADRE_L(PVTN)_HBsAg (opt4)
aggagagggcgcuuggcuugcaaggacccugagcugcggcauugaagcacacccaacccaacucgacugaagucagccucacugaaccggaucugagaaucuucucucucugggcuugccagggcucuccgaaccuagcuagcauccucuucaauuccaacuagaaagcuuaccaugaagugggugaccuucaucagccugcuguuccuguucagcagcgccuacagccuguuccaggaguaccagugcuacggcagcagcagcaacaccagagugcugaacgagcugaacuacgacaacgccggcaccaaccuguacaacgagcuggagaugaacuacuacggcaagcaggagaacugguacagccugaagaagaacagcagaagccugggcgagaacgacgacggcaacaacgaggacaacgagaagcugagaaagcccaagcacaagaagcugaagcagcccgccgacggcaaccccgaccccaacgccaaccccaacguggaccccaacgccaaccccaacguggaccccaacgccaaccccaacguggaccccaacgccaaccccaacgccaaccccaacgccaaccccaacgccaaccccaacgccaaccccaacgccaaccccaacgccaaccccaacgccaaccccaacgccaaccccaacgccaaccccaacgccaaccccaacgccaaccccaacgccaaccccaacgccaaccccaacgccaaccccaacgccaaccccaacgccaaccccaacguggaccccaacgccaaccccaacgccaaccccaacgccaaccccaacgccaaccccaacgccaaccccaacgccaaccccaacgccaaccccaacgccaaccccaacgccaaccccaacgccaaccccaacgccaaccccaacgccaaccccaacgccaaccccaacgccaaccccaacgccaaccccaacgccaaccccaacgccaaccccaacgccaaccccgccgccuacaucaagcccggcagcgccaacaagcccaaggacgagcuggacuacgccaacgacaucgaggccgccuacgccaaguucguggccgccuggacccugaaggccgccgcccccgugaccaacauggagaacaucaccagcggcuuccugggcccccugcuggugcugcaggccggcuucuuccugcugaccagaauccugaccaucccccagagccuggacagcugguggaccagccugaacuuccugggcggcagccccgugugccugggccagaacagccagagccccaccagcaaccacagccccaccagcugcccccccaucugccccggcuacagauggaugugccugagaagauucaucaucuuccuguucauccugcugcugugccugaucuuccugcuggugcugcuggacuaccagggcaugcugcccgugugcccccugauccccggcagcaccaccaccaacaccggccccugcaagaccugcaccacccccgcccagggcaacagcauguuccccagcugcugcugcaccaagcccaccgacggcaacugcaccugcauccccauccccagcagcugggccuucgccaaguaccugugggagugggccagcgugagauucagcuggcugagccugcuggugcccuucgugcagugguucgugggccugagccccaccguguggcugagcgccaucuggaugaugugguacuggggccccagccuguacagcaucgugagccccuucaucccccugcugcccaucuucuucugccuguggguguacaucugaggacuagucccuguucccagagcccacuuuuuuuucuuuuuuugaaauaaaauagccugucuuucagaucucaaaggcucuuuucagagccaccaaaaaaaaaaaaaaaaaaaaaaaaaaaaaaaaaaaaaaaaaaaaaaaaaaaaaaaaaaaaaaaaaaaaaaaaaaaaaaaaaaaaaaaaaaaaaaaaaaaaa

SEQ ID NO: 9933 - RNA, 2214 nt, Artificial Sequence
  mRNA Design a-3 (hSL-A100) comprising derived and/or modified sequence from Pf(3D7)__XP_001351122.1__HsALB_Pf-CSP(19-384)_L(PVTN)_HBsAg (opt4)
aggagagggcgcuuggcuugcaaggacccugagcugcggcauugaagcacacccaacccaacucgacugaagucagccucacugaaccggaucugagaaucuucucucucugggcuugccagggcucuccgaaccuagcuagcauccucuucaauuccaacuagaaagcuuaccaugaagugggugaccuucaucagccugcuguuccuguucagcagcgccuacagccuguuccaggaguaccagugcuacggcagcagcagcaacaccagagugcugaacgagcugaacuacgacaacgccggcaccaaccuguacaacgagcuggagaugaacuacuacggcaagcaggagaacugguacagccugaagaagaacagcagaagccugggcgagaacgacgacggcaacaacgaggacaacgagaagcugagaaagcccaagcacaagaagcugaagcagcccgccgacggcaaccccgaccccaacgccaaccccaacguggaccccaacgccaaccccaacguggaccccaacgccaaccccaacguggaccccaacgccaaccccaacgccaaccccaacgccaaccccaacgccaaccccaacgccaaccccaacgccaaccccaacgccaaccccaacgccaaccccaacgccaaccccaacgccaaccccaacgccaaccccaacgccaaccccaacgccaaccccaacgccaaccccaacgccaaccccaacgccaaccccaacgccaaccccaacguggaccccaacgccaaccccaacgccaaccccaacgccaaccccaacgccaaccccaacgccaaccccaacgccaaccccaacgccaaccccaacgccaaccccaacgccaaccccaacgccaaccccaacgccaaccccaacgccaaccccaacgccaaccccaacgccaaccccaacgccaaccccaacgccaaccccaacgccaaccccaacgccaaccccaacaagaacaaccagggcaacggccagggccacaacaugcccaacgaccccaacagaaacguggacgagaacgccaacgccaacagcgccgugaagaacaacaacaacgaggagcccagcgacaagcacaucaaggaguaccugaacaagauccagaacagccugagcaccgaguggagccccugcagcgugaccugcggcaacggcauccaggugagaaucaagcccggcagcgccaacaagcccaaggacgagcuggacuacgccaacgacaucgagaagaagaucugcaagauggagaagugcagcagcguguucaacguggugaacagcagccccgugaccaacauggagaacaucaccagcggcuuccugggcccccugcuggugcugcaggccggcuucuuccugcugaccagaauccugaccaucccccagagccuggacagcugguggaccagccugaacuuccugggcggcagccccgugugccugggccagaacagccagagccccaccagcaaccacagccccaccagcugcccccccaucugccccggcuacagauggaugugccugagaagauucaucaucuuccuguucauccugcugcugugccugaucuuccugcuggugcugcuggacuaccagggcaugcugcccgugugcccccugauccccggcagcaccaccaccaacaccggccccugcaagaccugcaccacccccgcccagggcaacagcauguuccccagcugcugcugcaccaagcccaccgacggcaacugcaccugcauccccauccccagcagcugggccuucgccaaguaccugugggagugggccagcgugagauucagcuggcugagccugcuggugcccuucgugcagugguucgugggccugagccccaccguguggcugagcgccaucuggaugaugugguacuggggccccagccuguacagcaucgugagccccuucaucccccugcugcccaucuucuucugccuguggguguacaucugaggacuagucccuguucccagagcccacuuuuuuuucuuuuuuugaaauaaaauagccugucuuucagaucucaaaggcucuuuucagagccaccaaaaaaaaaaaaaaaaaaaaaaaaaaaaaaaaaaaaaaaaaaaaaaaaaaaaaaaaaaaaaaaaaaaaaaaaaaaaaaaaaaaaaaaaaaaaaaaaaaaaa

SEQ ID NO: 9934 - RNA, 2031 nt, Artificial Sequence
  mRNA Design a-3 (hSL-A100) comprising derived and/or modified sequence from Pf(3D7)__XP_001351122.1__HsALB_Pf-CSP(19-384)_L(SGG)_Ferritin (opt4)
aggagagggcgcuuggcuugcaaggacccugagcugcggcauugaagcacacccaacccaacucgacugaagucagccucacugaaccggaucugagaaucuucucucucugggcuugccagggcucuccgaaccuagcuagcauccucuucaauuccaacuagaaagcuuaccaugaagugggugaccuucaucagccugcuguuccuguucagcagcgccuacagccuguuccaggaguaccagugcuacggcagcagcagcaacaccagagugcugaacgagcugaacuacgacaacgccggcaccaaccuguacaacgagcuggagaugaacuacuacggcaagcaggagaacugguacagccugaagaagaacagcagaagccugggcgagaacgacgacggcaacaacgaggacaacgagaagcugagaaagcccaagcacaagaagcugaagcagcccgccgacggcaaccccgaccccaacgccaaccccaacguggaccccaacgccaaccccaacguggaccccaacgccaaccccaacguggaccccaacgccaaccccaacgccaaccccaacgccaaccccaacgccaaccccaacgccaaccccaacgccaaccccaacgccaaccccaacgccaaccccaacgccaaccccaacgccaaccccaacgccaaccccaacgccaaccccaacgccaaccccaacgccaaccccaacgccaaccccaacgccaaccccaacgccaaccccaacguggaccccaacgccaaccccaacgccaaccccaacgccaaccccaacgccaaccccaacgccaaccccaacgccaaccccaacgccaaccccaacgccaaccccaacgccaaccccaacgccaaccccaacgccaaccccaacgccaaccccaacgccaaccccaacgccaaccccaacgccaaccccaacgccaaccccaacgccaaccccaacgccaaccccaacaagaacaaccagggcaacggccagggccacaacaugcccaacgaccccaacagaaacguggacgagaacgccaacgccaacagcgccgugaagaacaacaacaacgaggagcccagcgacaagcacaucaaggaguaccugaacaagauccagaacagccugagcaccgaguggagccccugcagcgugaccugcggcaacggcauccaggugagaaucaagcccggcagcgccaacaagcccaaggacgagcuggacuacgccaacgacaucgagaagaagaucugcaagauggagaagugcagcagcguguucaacguggugaacagcagcagcggcggccugagcaaggacaucaucaagcugcugaacgagcaggugaacaaggagaugaacagcagcaaccuguacaugagcaugagcagcuggugcuacacccacagccuggacggcgccggccuguuccuguucgaccacgccgccgaggaguacgagcacgccaagaagcugaucaucuuccugaacgagaacaacgugcccgugcagcugaccagcaucagcgcccccgagcacaaguucgagggccugacccagaucuuccagaaggccuacgagcacgagcagcacaucagcgagagcaucaacaacaucguggaccacgccaucaagagcaaggaccacgccaccuucaacuuccugcagugguacguggccgagcagcacgaggaggaggugcuguucaaggacauccuggacaagaucgagcugaucggcaacgagaaccacggccuguaccuggccgaccaguacgugaagggcaucgccaagagcagaaagagcugaggacuagucccuguucccagagcccacuuuuuuuucuuuuuuugaaauaaaauagccugucuuucagaucucaaaggcucuuuucagagccaccaaaaaaaaaaaaaaaaaaaaaaaaaaaaaaaaaaaaaaaaaaaaaaaaaaaaaaaaaaaaaaaaaaaaaaaaaaaaaaaaaaaaaaaaaaaaaaaaaaaaa

SEQ ID NO: 9935 - RNA, 1992 nt, Artificial Sequence
  mRNA Design a-3 (hSL-A100) comprising derived and/or modified sequence from Pf(3D7)__XP_001351122.1__HsALB_Pf-CSP(93-384)_L(PVTN)_HBsAg (opt4)
aggagagggcgcuuggcuugcaaggacccugagcugcggcauugaagcacacccaacccaacucgacugaagucagccucacugaaccggaucugagaaucuucucucucugggcuugccagggcucuccgaaccuagcuagcauccucuucaauuccaacuagaaagcuuaccaugaagugggugaccuucaucagccugcuguuccuguucagcagcgccuacagcaagcugaagcagcccgccgacggcaaccccgaccccaacgccaaccccaacguggaccccaacgccaaccccaacguggaccccaacgccaaccccaacguggaccccaacgccaaccccaacgccaaccccaacgccaaccccaacgccaaccccaacgccaaccccaacgccaaccccaacgccaaccccaacgccaaccccaacgccaaccccaacgccaaccccaacgccaaccccaacgccaaccccaacgccaaccccaacgccaaccccaacgccaaccccaacgccaaccccaacgccaaccccaacguggaccccaacgccaaccccaacgccaaccccaacgccaaccccaacgccaaccccaacgccaaccccaacgccaaccccaacgccaaccccaacgccaaccccaacgccaaccccaacgccaaccccaacgccaaccccaacgccaaccccaacgccaaccccaacgccaaccccaacgccaaccccaacgccaaccccaacgccaaccccaacgccaaccccaacaagaacaaccagggcaacggccagggccacaacaugcccaacgaccccaacagaaacguggacgagaacgccaacgccaacagcgccgugaagaacaacaacaacgaggagcccagcgacaagcacaucaaggaguaccugaacaagauccagaacagccugagcaccgaguggagccccugcagcgugaccugcggcaacggcauccaggugagaaucaagcccggcagcgccaacaagcccaaggacgagcuggacuacgccaacgacaucgagaagaagaucugcaagauggagaagugcagcagcguguucaacguggugaacagcagccccgugaccaacauggagaacaucaccagcggcuuccugggcccccugcuggugcugcaggccggcuucuuccugcugaccagaauccugaccaucccccagagccuggacagcugguggaccagccugaacuuccugggcggcagccccgugugccugggccagaacagccagagccccaccagcaaccacagccccaccagcugcccccccaucugccccggcuacagauggaugugccugagaagauucaucaucuuccuguucauccugcugcugugccugaucuuccugcuggugcugcuggacuaccagggcaugcugcccgugugcccccugauccccggcagcaccaccaccaacaccggccccugcaagaccugcaccacccccgcccagggcaacagcauguuccccagcugcugcugcaccaagcccaccgacggcaacugcaccugcauccccauccccagcagcugggccuucgccaaguaccugugggagugggccagcgugagauucagcuggcugagccugcuggugcccuucgugcagugguucgugggccugagccccaccguguggcugagcgccaucuggaugaugugguacuggggccccagccuguacagcaucgugagccccuucaucccccugcugcccaucuucuucugccuguggguguacaucugaggacuagucccuguucccagagcccacuuuuuuuucuuuuuuugaaauaaaauagccugucuuucagaucucaaaggcucuuuucagagccaccaaaaaaaaaaaaaaaaaaaaaaaaaaaaaaaaaaaaaaaaaaaaaaaaaaaaaaaaaaaaaaaaaaaaaaaaaaaaaaaaaaaaaaaaaaaaaaaaaaaaa

SEQ ID NO: 9936 - RNA, 1653 nt, Artificial Sequence; identical to SEQ ID NO: 8408
  mRNA Design a-3 (hSL-A100) comprising derived and/or modified sequence from Pf(3D7)__XP_001351122.1__HsALB_Pf-CSP(199-377)_L(PVTN)_HBsAg (opt4)

SEQ ID NO: 9937 - RNA, 1350 nt, Artificial Sequence
  mRNA Design a-3 (hSL-A100) comprising derived and/or modified sequence from Pf(3D7)__XP_001351122.1__HsALB_Pf-CSP(19-272)_L(AAY)_Pf-CSP(346-3 75)_L(AAY)_Pf-CSP(310-327) (opt4)
aggagagggcgcuuggcuugcaaggacccugagcugcggcauugaagcacacccaacccaacucgacugaagucagccucacugaaccggaucugagaaucuucucucucugggcuugccagggcucuccgaaccuagcuagcauccucuucaauuccaacuagaaagcuuaccaugaagugggugaccuucaucagccugcuguuccuguucagcagcgccuacagccuguuccaggaguaccagugcuacggcagcagcagcaacaccagagugcugaacgagcugaacuacgacaacgccggcaccaaccuguacaacgagcuggagaugaacuacuacggcaagcaggagaacugguacagccugaagaagaacagcagaagccugggcgagaacgacgacggcaacaacgaggacaacgagaagcugagaaagcccaagcacaagaagcugaagcagcccgccgacggcaaccccgaccccaacgccaaccccaacguggaccccaacgccaaccccaacguggaccccaacgccaaccccaacguggaccccaacgccaaccccaacgccaaccccaacgccaaccccaacgccaaccccaacgccaaccccaacgccaaccccaacgccaaccccaacgccaaccccaacgccaaccccaacgccaaccccaacgccaaccccaacgccaaccccaacgccaaccccaacgccaaccccaacgccaaccccaacgccaaccccaacgccaaccccaacguggaccccaacgccaaccccaacgccaaccccaacgccaaccccaacgccaaccccaacgccaaccccaacgccaaccccaacgccaaccccaacgccaaccccaacgccaaccccaacgccaaccccaacgccaaccccaacgccaaccccaacgccaaccccaacgccaaccccaacgccaaccccaacgccaaccccaacgccaaccccaacgccaaccccgccgccuacaucaagcccggcagcgccaacaagcccaaggacgagcuggacuacgccaacgacaucgagaagaagaucugcaagauggagaagugcagcgccgccuacgagcccagcgacaagcacaucaaggaguaccugaacaagauccagaacagccugugaggacuagucccuguucccagagcccacuuuuuuuucuuuuuuugaaauaaaauagccugucuuucagaucucaaaggcucuuuucagagccaccaaaaaaaaaaaaaaaaaaaaaaaaaaaaaaaaaaaaaaaaaaaaaaaaaaaaaaaaaaaaaaaaaaaaaaaaaaaaaaaaaaaaaaaaaaaaaaaaaaaaa

SEQ ID NO: 9938 - RNA, 1398 nt, Artificial Sequence
  mRNA Design a-3 (hSL-A100) comprising derived and/or modified sequence from Pf(3D7)__XP_001351122.1__HsALB_Pf-CSP(19-272)_L(AAY)_Pf-CSP(346-3 75)_L(AAY)_Pf-CSP(310-327)_L(AAY)_PADRE (opt4)
aggagagggcgcuuggcuugcaaggacccugagcugcggcauugaagcacacccaacccaacucgacugaagucagccucacugaaccggaucugagaaucuucucucucugggcuugccagggcucuccgaaccuagcuagcauccucuucaauuccaacuagaaagcuuaccaugaagugggugaccuucaucagccugcuguuccuguucagcagcgccuacagccuguuccaggaguaccagugcuacggcagcagcagcaacaccagagugcugaacgagcugaacuacgacaacgccggcaccaaccuguacaacgagcuggagaugaacuacuacggcaagcaggagaacugguacagccugaagaagaacagcagaagccugggcgagaacgacgacggcaacaacgaggacaacgagaagcugagaaagcccaagcacaagaagcugaagcagcccgccgacggcaaccccgaccccaacgccaaccccaacguggaccccaacgccaaccccaacguggaccccaacgccaaccccaacguggaccccaacgccaaccccaacgccaaccccaacgccaaccccaacgccaaccccaacgccaaccccaacgccaaccccaacgccaaccccaacgccaaccccaacgccaaccccaacgccaaccccaacgccaaccccaacgccaaccccaacgccaaccccaacgccaaccccaacgccaaccccaacgccaaccccaacgccaaccccaacguggaccccaacgccaaccccaacgccaaccccaacgccaaccccaacgccaaccccaacgccaaccccaacgccaaccccaacgccaaccccaacgccaaccccaacgccaaccccaacgccaaccccaacgccaaccccaacgccaaccccaacgccaaccccaacgccaaccccaacgccaaccccaacgccaaccccaacgccaaccccaacgccaaccccgccgccuacaucaagcccggcagcgccaacaagcccaaggacgagcuggacuacgccaacgacaucgagaagaagaucugcaagauggagaagugcagcgccgccuacgagcccagcgacaagcacaucaaggaguaccugaacaagauccagaacagccuggccgccuacgccaaguucguggccgccuggacccugaaggccgccgccugaggacuagucccuguucccagagcccacuuuuuuuucuuuuuuugaaauaaaauagccugucuuucagaucucaaaggcucuuuucagagccaccaaaaaaaaaaaaaaaaaaaaaaaaaaaaaaaaaaaaaaaaaaaaaaaaaaaaaaaaaaaaaaaaaaaaaaaaaaaaaaaaaaaaaaaaaaaaaaaaaaaaa

SEQ ID NO: 9939 - RNA, 1398 nt, Artificial Sequence
  mRNA Design a-3 (hSL-A100) comprising derived and/or modified sequence from Pf(3D7)__XP_001351122.1__HsALB_Pf-CSP(19-272)_L(AAY)_Pf-CSP(310-3 27)_L(AAY)_Pf-CSP(346-375)_L(AAY)_PADRE (opt4)
aggagagggcgcuuggcuugcaaggacccugagcugcggcauugaagcacacccaacccaacucgacugaagucagccucacugaaccggaucugagaaucuucucucucugggcuugccagggcucuccgaaccuagcuagcauccucuucaauuccaacuagaaagcuuaccaugaagugggugaccuucaucagccugcuguuccuguucagcagcgccuacagccuguuccaggaguaccagugcuacggcagcagcagcaacaccagagugcugaacgagcugaacuacgacaacgccggcaccaaccuguacaacgagcuggagaugaacuacuacggcaagcaggagaacugguacagccugaagaagaacagcagaagccugggcgagaacgacgacggcaacaacgaggacaacgagaagcugagaaagcccaagcacaagaagcugaagcagcccgccgacggcaaccccgaccccaacgccaaccccaacguggaccccaacgccaaccccaacguggaccccaacgccaaccccaacguggaccccaacgccaaccccaacgccaaccccaacgccaaccccaacgccaaccccaacgccaaccccaacgccaaccccaacgccaaccccaacgccaaccccaacgccaaccccaacgccaaccccaacgccaaccccaacgccaaccccaacgccaaccccaacgccaaccccaacgccaaccccaacgccaaccccaacgccaaccccaacguggaccccaacgccaaccccaacgccaaccccaacgccaaccccaacgccaaccccaacgccaaccccaacgccaaccccaacgccaaccccaacgccaaccccaacgccaaccccaacgccaaccccaacgccaaccccaacgccaaccccaacgccaaccccaacgccaaccccaacgccaaccccaacgccaaccccaacgccaaccccaacgccaaccccgccgccuacgagcccagcgacaagcacaucaaggaguaccugaacaagauccagaacagccuggccgccuacaucaagcccggcagcgccaacaagcccaaggacgagcuggacuacgccaacgacaucgagaagaagaucugcaagauggagaagugcagcgccgccuacgccaaguucguggccgccuggacccugaaggccgccgccugaggacuagucccuguucccagagcccacuuuuuuuucuuuuuuugaaauaaaauagccugucuuucagaucucaaaggcucuuuucagagccaccaaaaaaaaaaaaaaaaaaaaaaaaaaaaaaaaaaaaaaaaaaaaaaaaaaaaaaaaaaaaaaaaaaaaaaaaaaaaaaaaaaaaaaaaaaaaaaaaaaaaa

SEQ ID NO: 9940 - RNA, 1452 nt, Artificial Sequence
  mRNA Design a-3 (hSL-A100) comprising derived and/or modified sequence from Pf(3D7)__XP_001351122.1__HsALB_Pf-CSP(19-272)_L(AAY)_Pf-CSP(310-3 27)_L(AAY)_Pf-CSP(346-375)_L(AAY)_PADRE_L(AAY)_P2 (opt4)
aggagagggcgcuuggcuugcaaggacccugagcugcggcauugaagcacacccaacccaacucgacugaagucagccucacugaaccggaucugagaaucuucucucucugggcuugccagggcucuccgaaccuagcuagcauccucuucaauuccaacuagaaagcuuaccaugaagugggugaccuucaucagccugcuguuccuguucagcagcgccuacagccuguuccaggaguaccagugcuacggcagcagcagcaacaccagagugcugaacgagcugaacuacgacaacgccggcaccaaccuguacaacgagcuggagaugaacuacuacggcaagcaggagaacugguacagccugaagaagaacagcagaagccugggcgagaacgacgacggcaacaacgaggacaacgagaagcugagaaagcccaagcacaagaagcugaagcagcccgccgacggcaaccccgaccccaacgccaaccccaacguggaccccaacgccaaccccaacguggaccccaacgccaaccccaacguggaccccaacgccaaccccaacgccaaccccaacgccaaccccaacgccaaccccaacgccaaccccaacgccaaccccaacgccaaccccaacgccaaccccaacgccaaccccaacgccaaccccaacgccaaccccaacgccaaccccaacgccaaccccaacgccaaccccaacgccaaccccaacgccaaccccaacgccaaccccaacguggaccccaacgccaaccccaacgccaaccccaacgccaaccccaacgccaaccccaacgccaaccccaacgccaaccccaacgccaaccccaacgccaaccccaacgccaaccccaacgccaaccccaacgccaaccccaacgccaaccccaacgccaaccccaacgccaaccccaacgccaaccccaacgccaaccccaacgccaaccccaacgccaaccccgccgccuacgagcccagcgacaagcacaucaaggaguaccugaacaagauccagaacagccuggccgccuacaucaagcccggcagcgccaacaagcccaaggacgagcuggacuacgccaacgacaucgagaagaagaucugcaagauggagaagugcagcgccgccuacgccaaguucguggccgccuggacccugaaggccgccgccgccgccuaccaguacaucaaggccaacagcaaguucaucggcaucaccgagcugugaggacuagucccuguucccagagcccacuuuuuuuucuuuuuuugaaauaaaauagccugucuuucagaucucaaaggcucuuuucagagccaccaaaaaaaaaaaaaaaaaaaaaaaaaaaaaaaaaaaaaaaaaaaaaaaaaaaaaaaaaaaaaaaaaaaaaaaaaaaaaaaaaaaaaaaaaaaaaaaaaaaaa

SEQ ID NO: 9941 - RNA, 1416 nt, Artificial Sequence
  mRNA Design a-3 (hSL-A100) comprising derived and/or modified sequence from Pf(3D7)__XP_001351122.1__HsALB_Pf-CSP(19-272)_L(AAY)_Pf-CSP(310-3 27)_Linker (AAY)_Pf-CSP(346-397) (opt4)
aggagagggcgcuuggcuugcaaggacccugagcugcggcauugaagcacacccaacccaacucgacugaagucagccucacugaaccggaucugagaaucuucucucucugggcuugccagggcucuccgaaccuagcuagcauccucuucaauuccaacuagaaagcuuaccaugaagugggugaccuucaucagccugcuguuccuguucagcagcgccuacagccuguuccaggaguaccagugcuacggcagcagcagcaacaccagagugcugaacgagcugaacuacgacaacgccggcaccaaccuguacaacgagcuggagaugaacuacuacggcaagcaggagaacugguacagccugaagaagaacagcagaagccugggcgagaacgacgacggcaacaacgaggacaacgagaagcugagaaagcccaagcacaagaagcugaagcagcccgccgacggcaaccccgaccccaacgccaaccccaacguggaccccaacgccaaccccaacguggaccccaacgccaaccccaacguggaccccaacgccaaccccaacgccaaccccaacgccaaccccaacgccaaccccaacgccaaccccaacgccaaccccaacgccaaccccaacgccaaccccaacgccaaccccaacgccaaccccaacgccaaccccaacgccaaccccaacgccaaccccaacgccaaccccaacgccaaccccaacgccaaccccaacgccaaccccaacguggaccccaacgccaaccccaacgccaaccccaacgccaaccccaacgccaaccccaacgccaaccccaacgccaaccccaacgccaaccccaacgccaaccccaacgccaaccccaacgccaaccccaacgccaaccccaacgccaaccccaacgccaaccccaacgccaaccccaacgccaaccccaacgccaaccccaacgccaaccccaacgccaaccccgccgccuacgagcccagcgacaagcacaucaaggaguaccugaacaagauccagaacagccuggccgccuacaucaagcccggcagcgccaacaagcccaaggacgagcuggacuacgccaacgacaucgagaagaagaucugcaagauggagaagugcagcagcguguucaacguggugaacagcagcaucggccugaucauggugcugagcuuccuguuccugaacugaggacuagucccuguucccagagcccacuuuuuuuucuuuuuuugaaauaaaauagccugucuuucagaucucaaaggcucuuuucagagccaccaaaaaaaaaaaaaaaaaaaaaaaaaaaaaaaaaaaaaaaaaaaaaaaaaaaaaaaaaaaaaaaaaaaaaaaaaaaaaaaaaaaaaaaaaaaaaaaaaaaaa

SEQ ID NO: 9942 - RNA, 2016 nt, Artificial Sequence
  mRNA Design a-3 (hSL-A100) comprising derived and/or modified sequence from Pf(3D7)__XP_001351122.1__LumSynt_L(GGS4-GGG)_Pf-CSP(19-397) (opt5)
aggagagggcgcuuggcuugcaaggacccugagcugcggcauugaagcacacccaacccaacucgacugaagucagccucacugaaccggaucugagaaucuucucucucugggcuugccagggcucuccgaaccuagcuagcauccucuucaauuccaacuagaaagcuuaccaugcagaucuacgagggcaagcugaccgccgaagggcucagauucggaauuguggcuagccgguuuaaccacgcccuggucgaccgccuuguugagggcgcgaucgaugcuauugugagacaugggggacgggaagaggacaucacacuggugcgcguccccggcuccugggaaauuccuguggccgccggggagcucgcuagaaaagaggauaucgacgccguuaucgcuauuggagugcugauccggggcgccacgccgcacuucgauuauauugcgucugaagucagcaagggccuugccgaccugucccucgagcugcgcaaacccaucaccuuuggggugauuacagcugauacccuggaacaagccaucgagagagcuggaacaaagcauggcaauaaagggugggaggccgcgcucucugccauugaaauggcuaaccuguucaagagccuucggggaggcuccgggggaucuggcggcagcgggggauccggcgggggacuguuucaggaguaccagugcuauggcuccucuuccaauacccgcguucucaacgaacugaauuacgacaacgccgggacaaaucuuuauaacgagcuggaaaugaauuacuauggaaagcaggagaacugguacagccucaaaaagaacucuagaucccugggcgagaaugaugacggcaauaacgaagauaaugagaaacugcggaagccuaaacacaagaagcucaaacaacccgcugacgggaacccugaucccaacgccaauccuaacguggacccgaaugccaaccccaaugucgacccuaacgcuaaucccaacguggauccuaaugcgaaccccaaugccaacccgaaugcuaacccuaaugccaaccccaacgccaauccuaacgcuaaucccaacgccaaucccaacgcgaauccuaacgcuaauccgaacgccaaucccaacgccaauccuaacgcuaaucccaacgccaacccuaaugcuaaccccaaugccaacccgaaugcgaacccuaaugccaaccccaauguggacccuaacgcuaaucccaacgccaauccuaacgcuaaucccaacgccaacccgaaugcgaacccuaaugccaaccccaaugcuaaccccaaugccaacccuaaugcuaacccgaaugccaaccccaaugccaacccuaaugcuaaccccaaugcgaacccuaacgccaaucccaacgcuaauccuaacgccaaucccaacgccaauccgaacgcuaauccuaacaagaauaaccagggaaauggccaggggcauaacaugcccaaugauccuaaccgcaacgucgacgaaaaugccaacgcgaauagcgcuguuaaaaacaauaacaaugaggaacccucugauaagcacaucaaagaguaccugaacaagauccagaauagccuuagcaccgagugguccccguguucugugacgugcggaaacggcauucaagugagaaucaaaccugggagcgccaauaagcccaaggacgaacuggauuaugccaacgacauugagaaaaagaucuguaaaauggaaaagugcuccagcgucuucaaugugguuaacucuuccauuggccucaucauggugcugagcuuucuuuuccugaauugaggacuagucccuguucccagagcccacuuuuuuuucuuuuuuugaaauaaaauagccugucuuucagaucucaaaggcucuuuucagagccaccaaaaaaaaaaaaaaaaaaaaaaaaaaaaaaaaaaaaaaaaaaaaaaaaaaaaaaaaaaaaaaaaaaaaaaaaaaaaaaaaaaaaaaaaaaaaaaaaaaaaa

SEQ ID NO: 9943 - RNA, 1878 nt, Artificial Sequence
  mRNA Design a-3 (hSL-A100) comprising derived and/or modified sequence from Pf(3D7)__XP_001351122.1__HsALB_Pf-CSP(19-272)_L(PVTN)_HBsAg (opt5)
aggagagggcgcuuggcuugcaaggacccugagcugcggcauugaagcacacccaacccaacucgacugaagucagccucacugaaccggaucugagaaucuucucucucugggcuugccagggcucuccgaaccuagcuagcauccucuucaauuccaacuagaaagcuuaccaugaagugggugaccuucaucagccugcucuuucuguucuccucugccuacagccuuuuucaggaguaucaaugcuacggcuccucuagcaacacaagaguccugaaugaacucaacuaugacaaugcugggacgaaccuguacaaugagcuugaaaugaacuauuacggaaaacaggagaauugguauucccugaagaaaaacucucggagccucggcgaaaaugaugacgggaacaaugaggauaacgagaagcugcgcaaacccaagcacaagaaacugaagcagccugccgacggaaauccggaucccaacgcgaauccuaacguugaccccaacgcuaauccuaacguggaucccaaugccaacccuaauguggacccgaacgccaaucccaacgcuaauccuaacgccaaucccaacgcuaauccuaacgccaaucccaacgcgaacccgaaugccaacccuaaugcuaaccccaaugccaacccuaaugcuaaccccaaugccaaccccaaugcgaacccuaaugccaacccgaaugcuaaccccaacgccaauccuaacgcuaaucccaacgccaauccuaacgucgaucccaaugccaacccgaaugcuaacccuaaugcgaaccccaaugccaacccuaaugcuaaccccaacgccaauccuaacgccaaucccaacgcuaauccgaacgccaauccuaacgcgaaucccaacgcuaaucccaacgccaauccuaacgccaauccgaacgcuaaucccaacgccaacccuaaugcuaaccccaaugccaacccuaaugcgaaucccccugugaccaacauggaaaacauuacauccggcuuccucgggccccugcuuguucugcaggccggauuuuuccuccugaccagaauccuuacaauuccgcaaagccuggacucuugguggaccucccucaauuuucugggcggcagcccugugugucuggggcagaacucucagucccccacaagcaaucauucuccuaccuccugucccccgaucugcccuggauaccgguggaugugccuccgcagauucauuaucuuucuguucauccuucugcucugucugauuuuucuucugguccuccuggauuaccagggcaugcugcccgugugcccucucauccccgggagcacgaccacaaacaccggacccuguaaaacaugcaccacgccugcucaaggcaauuccauguucccgucuuguugcuguacaaagcccaccgacgggaacugcacaugcauuccuauccccagcuccugggccuuugcuaaauaucugugggagugggccagcguucgguucucuuggcuuucccugcucgugccuuucguccagugguuugugggacugagccccaccguguggcuuucugcgauuuggaugaugugguacuggggcccuagccuguauuccaucgucucuccguucauuccccuccugccuaucuuuuucugucuguggguuuacaucugaggacuagucccuguucccagagcccacuuuuuuuucuuuuuuugaaauaaaauagccugucuuucagaucucaaaggcucuuuucagagccaccaaaaaaaaaaaaaaaaaaaaaaaaaaaaaaaaaaaaaaaaaaaaaaaaaaaaaaaaaaaaaaaaaaaaaaaaaaaaaaaaaaaaaaaaaaaaaaaaaaaaa

SEQ ID NO: 9944 - RNA, 1995 nt, Artificial Sequence
  mRNA Design a-3 (hSL-A100) comprising derived and/or modified sequence from Pf(3D7)__XP_001351122.1__HsALB_Pf-CSP(19-272)_L(AAY)_Pf-CSP(346-3 65)_L(AAY)_PADRE_L(PVTN)_HBsAg (opt5)
aggagagggcgcuuggcuugcaaggacccugagcugcggcauugaagcacacccaacccaacucgacugaagucagccucacugaaccggaucugagaaucuucucucucugggcuugccagggcucuccgaaccuagcuagcauccucuucaauuccaacuagaaagcuuaccaugaagugggugaccuucaucagccugcucuuucuguucuccucugccuacagccuuuuucaggaguaucaaugcuacggcuccucuagcaacacaagaguccugaaugaacucaacuaugacaaugcugggacgaaccuguacaaugagcuugaaaugaacuauuacggaaaacaggagaauugguauucccugaagaaaaacucucggagccucggcgaaaaugaugacgggaacaaugaggauaacgagaagcugcgcaaacccaagcacaagaaacugaagcagccugccgacggaaauccggaucccaacgcgaauccuaacguugaccccaacgcuaauccuaacguggaucccaaugccaacccuaauguggacccgaacgccaaucccaacgcuaauccuaacgccaaucccaacgcuaauccuaacgccaaucccaacgcgaacccgaaugccaacccuaaugcuaaccccaaugccaacccuaaugcuaaccccaaugccaaccccaaugcgaacccuaaugccaacccgaaugcuaaccccaacgccaauccuaacgcuaaucccaacgccaauccuaacgucgaucccaaugccaacccgaaugcuaacccuaaugcgaaccccaaugccaacccuaaugcuaaccccaacgccaauccuaacgccaaucccaacgcuaauccgaacgccaauccuaacgcgaaucccaacgcuaaucccaacgccaauccuaacgccaauccgaacgcuaaucccaacgccaacccuaaugcuaaccccaaugccaacccuaaugcgaaccccgccgcuuacauuaaaccuggcuccgccaauaagcccaaagacgaacucgauuacgcuaacgacaucgaggccgcguaugccaaguucguggcugccuggacccugaaggcugccgccccgguuacaaauauggaaaacauuaccagcggguuucuuggaccucugcucgugcugcaggcuggcuucuuucuucugacaagaauccucaccauuccccaaucucuggauuccugguggacaagccugaauuuccucggcgggucuccugucugucugggacagaacucccagagccccaccucuaaucauuccccgacgagcugcccucccaucuguccuggcuaccgguggaugugccuucgcagauuuaucauuuuccuguuuauccuccugcuuugucugauuuuccuccuggugcugcucgacuaucaggggaugcugcccguuugcccccuuaucccuggauccaccacaaccaacacaggcccguguaaaaccugcacgacacccgcgcaaggaaauucuauguuuccuagcuguugcuguaccaagcccacagacgggaacuguaccugcauuccuauccccuccagcugggccuucgcuaaauaccugugggagugggccucugugcgguucuccuggcucagccugcuugucccuuuugugcagugguucgugggccugucuccgaccgucuggcucagcgccauuuggaugaugugguauuggggccccucccuguacucuaucguuagcccuuuuaucccccugcucccuauuuucuuuugccuguggguguauaucugaggacuagucccuguucccagagcccacuuuuuuuucuuuuuuugaaauaaaauagccugucuuucagaucucaaaggcucuuuucagagccaccaaaaaaaaaaaaaaaaaaaaaaaaaaaaaaaaaaaaaaaaaaaaaaaaaaaaaaaaaaaaaaaaaaaaaaaaaaaaaaaaaaaaaaaaaaaaaaaaaaaaa

SEQ ID NO: 9945 - RNA, 2214 nt, Artificial Sequence
  mRNA Design a-3 (hSL-A100) comprising derived and/or modified sequence from Pf(3D7)__XP_001351122.1__HsALB_Pf-CSP(19-384)_L(PVTN)_HBsAg (opt5)
aggagagggcgcuuggcuugcaaggacccugagcugcggcauugaagcacacccaacccaacucgacugaagucagccucacugaaccggaucugagaaucuucucucucugggcuugccagggcucuccgaaccuagcuagcauccucuucaauuccaacuagaaagcuuaccaugaagugggugaccuucaucagccugcucuuucuguucuccucugccuacagccuuuuucaggaguaucaaugcuacggcuccucuagcaacacaagaguccugaaugaacucaacuaugacaaugcugggacgaaccuguacaaugagcuugaaaugaacuauuacggaaaacaggagaauugguauucccugaagaaaaacucucggagccucggcgaaaaugaugacgggaacaaugaggauaacgagaagcugcgcaaacccaagcacaagaaacugaagcagccugccgacggaaauccggaucccaacgcgaauccuaacguugaccccaacgcuaauccuaacguggaucccaaugccaacccuaauguggacccgaacgccaaucccaacgcuaauccuaacgccaaucccaacgcuaauccuaacgccaaucccaacgcgaacccgaaugccaacccuaaugcuaaccccaaugccaacccuaaugcuaaccccaaugccaaccccaaugcgaacccuaaugccaacccgaaugcuaaccccaacgccaauccuaacgcuaaucccaacgccaauccuaacgucgaucccaaugccaacccgaaugcuaacccuaaugcgaaccccaaugccaacccuaaugcuaaccccaacgccaauccuaacgccaaucccaacgcuaauccgaacgccaauccuaacgcgaaucccaacgcuaaucccaacgccaauccuaacgccaauccgaacgcuaaucccaacgccaacccuaaugcuaaccccaaugccaacccuaaugcgaaccccaauaaaaacaaucagggcaacgggcaaggacauaauaugccuaacgaccccaauagaaacguggaugaaaaugccaacgcuaacuccgccguuaagaauaacaauaacgaggaaccgagcgacaaacacauuaaggaguaccucaauaagauccagaacucucuguccaccgaguggagcccuuguucugugacaugcggcaauggcauucagguccggaucaaacccggguccgcuaacaagccuaaagaugaacuugacuacgccaaugacauugagaagaaaaucuguaagauggaaaaaugcagcucuguguucaacguugucaauuccagccccgugaccaacauggagaauaucacauccggauuucugggcccgcuccuggugcuucaggcgggguucuuucugcucacccgcauucugacaaucccucaaucucuggauagcugguggaccucccucaacuuccugggaggcagccccgugugucuugggcaaaauucucaguccccuacgagcaaccauucucccaccagcugucccccuauuugcccgggauauagauggaugugccugcggcgcuuuaucauuuuccucuuuauccugcuucugugucucauuuuccugcugguccuccuggacuaccagggcaugcuucccguuugcccucugauccccggcuccacaaccacaaacaccgggccuuguaagacgugcacaacccccgcccagggaaauucuauguuuccuagcugcuguugcacaaagccgaccgauggcaacuguaccugcauccccauuccuuccagcugggcuuucgccaaauaucucugggaaugggcuucugugagauucuccuggcugagccuucuggugcccuuuguccagugguucguggggcucucuccuacaguuuggcuguccgccaucuggaugaugugguacuggggacccagccuguauuccauugugucuccguuuaucccucuccugcccauuuucuuuugucuuugggucuacaucugaggacuagucccuguucccagagcccacuuuuuuuucuuuuuuugaaauaaaauagccugucuuucagaucucaaaggcucuuuucagagccaccaaaaaaaaaaaaaaaaaaaaaaaaaaaaaaaaaaaaaaaaaaaaaaaaaaaaaaaaaaaaaaaaaaaaaaaaaaaaaaaaaaaaaaaaaaaaaaaaaaaaa

SEQ ID NO: 9946 - RNA, 2031 nt, Artificial Sequence
  mRNA Design a-3 (hSL-A100) comprising derived and/or modified sequence from Pf(3D7)__XP_001351122.1__HsALB_Pf-CSP(19-384)_L(SGG)_Ferritin (opt5)
aggagagggcgcuuggcuugcaaggacccugagcugcggcauugaagcacacccaacccaacucgacugaagucagccucacugaaccggaucugagaaucuucucucucugggcuugccagggcucuccgaaccuagcuagcauccucuucaauuccaacuagaaagcuuaccaugaagugggugaccuucaucagccugcucuuucuguucuccucugccuacagccuuuuucaggaguaucaaugcuacggcuccucuagcaacacaagagugcugaaugaacucaacuaugacaaugcugggacgaaccuguacaaugagcuugaaaugaacuauuacggaaaacaggagaauugguauucccugaagaaaaacucucggagccucggcgaaaaugaugacgggaacaaugaggauaacgagaagcugcgcaaacccaagcacaagaaacugaagcagccugccgacggaaauccggaucccaacgcgaauccuaacguugaccccaacgcuaauccuaacguggaucccaaugccaacccuaauguggacccgaacgccaaucccaacgcuaauccuaacgccaaucccaacgcuaauccuaacgccaaucccaacgcgaacccgaaugccaacccuaaugcuaaccccaaugccaacccuaaugcuaaccccaaugccaaccccaaugcgaacccuaaugccaacccgaaugcuaaccccaacgccaauccuaacgcuaaucccaacgccaauccuaacgucgaucccaaugccaacccgaaugcuaacccuaaugcgaaccccaaugccaacccuaaugcuaaccccaacgccaauccuaacgccaaucccaacgcuaauccgaacgccaauccuaacgcgaaucccaacgcuaaucccaacgccaauccuaacgccaauccgaacgcuaaucccaacgccaacccuaaugcuaaccccaaugccaacccuaaugcgaaccccaauaaaaacaaucagggcaacgggcaaggacauaauaugccuaacgaccccaauagaaacguggaugaaaaugccaacgcuaacuccgccguuaagaauaacaauaacgaggaaccgagcgacaaacacauuaaggaguaccucaauaagauccagaacucucuguccaccgaguggagcccuuguucugugacaugcggcaauggcauucagguccggaucaaacccggguccgcuaacaagccuaaagaugaacuugacuacgccaaugacauugagaagaaaaucuguaagauggaaaaaugcagcucuguguucaacguugugaacuccagcuccggaggccugucuaaggauaucauuaagcuccugaaugagcaggucaauaaagaaaugaacagcuccaaucuuuauaugagcaugucuuccugguguuacacccauagccuggacggggcgggacucuuucuguucgaucacgccgcugaggaguaugaacaugccaagaaacugaucauuuuucucaacgagaacaaugugcccgugcaacugacaucuaucagcgcuccggaacacaaguucgagggccuuacccagauuuuucagaaagccuacgaacacgagcagcauaucuccgagucuauuaacaauaucgucgaccacgccaucaagagcaaggaucaugcuacauucaacuuucugcaaugguauguugcggaacagcacgaggaagagguccucuucaaagacauucuggauaagaucgaacuuauugggaaugagaaccacggacuguaccucgccgaccaguaugugaaaggcaucgcuaagucccgcaaaagcugaggacuagucccuguucccagagcccacuuuuuuuucuuuuuuugaaauaaaauagccugucuuucagaucucaaaggcucuuuucagagccaccaaaaaaaaaaaaaaaaaaaaaaaaaaaaaaaaaaaaaaaaaaaaaaaaaaaaaaaaaaaaaaaaaaaaaaaaaaaaaaaaaaaaaaaaaaaaaaaaaaaaa

SEQ ID NO: 9947 - RNA, 1992 nt, Artificial Sequence
  mRNA Design a-3 (hSL-A100) comprising derived and/or modified sequence from Pf(3D7)__XP_001351122.1__HsALB_Pf-CSP(93-384)_L(PVTN)_HBsAg (opt5)
aggagagggcgcuuggcuugcaaggacccugagcugcggcauugaagcacacccaacccaacucgacugaagucagccucacugaaccggaucugagaaucuucucucucugggcuugccagggcucuccgaaccuagcuagcauccucuucaauuccaacuagaaagcuuaccaugaagugggugaccuucaucagccugcucuuucuguucuccucugccuacagcaaacuuaagcagcccgcugacggcaacccugauccgaaugccaaccccaaugucgacccuaacgcgaaucccaacguugauccuaaugcuaaccccaauguggacccuaacgccaauccgaacgccaaucccaacgcuaauccuaacgccaaccccaaugcuaacccuaaugccaaccccaaugcgaacccgaaugccaacccuaaugcuaaccccaaugccaacccuaaugcuaaccccaaugccaaccccaacgcgaauccuaacgccaauccgaacgcuaaucccaacgccaauccuaacgcuaaucccaacguggauccuaaugccaaccccaaugccaacccgaaugcuaacccuaacgcgaaucccaacgccaauccuaacgcuaaucccaacgccaauccuaacgccaaucccaacgcuaauccgaacgccaauccuaacgcgaaucccaacgcuaaccccaaugccaacccuaaugccaacccgaaugcuaaccccaaugccaacccuaaugcuaaccccaaugccaacccuaauaaaaacaaucaagggaacggacagggccacaauaugcccaacgacccuaacagaaaugucgaugagaacgcgaaugccaacuccgcugugaagaauaacaauaacgaggaacccucugacaaacauauuaaggaauaucugaauaagauccagaacagccucuccacagaguggucuccgugcagcguuacgugugggaaugggauucaggugcggaucaaaccuggcuccgccaacaagcccaaagaugaacuggacuacgcuaaugauauugagaagaaaaucugcaagauggagaaguguagcucugucuuuaacgugguuaauuccagcccugugaccaacauggaaaacaucacaucuggguuccuuggaccccugcucguccugcaagccggcuuuuuccugcucacccgcauucugacaaucccgcagucccuugacagcugguggaccucucugaauuuucucggcggguccccugugugccugggacagaacagccagucccccacaucuaaucacagcccuaccuccuguccucccauuugccccggcuauagauggaugugucuucggcgcuucaucauuuuucuguucauccuccugcugugccucauuuuucugcuugugcugcucgauuaccaagggaugcugccggucuguccccuuaucccuggaagcacgaccacaaacaccggccccugcaaaacauguaccacgccugcgcagggaaauucuauguuccccuccugcugcuguacaaagccuaccgacggaaacugcacauguaucccgauucccagcucuugggccuuugcuaaauaucugugggagugggccagcguuagauucuccuggcucucucugcuggugccuuucgugcagugguuugucggccucagccccaccguguggcuguccgcuaucuggaugaugugguacuggggcccuagccuuuauucuauuguuucccccuucaucccgcugcucccuaucuuuuucugccuguggguguacauuugaggacuagucccuguucccagagcccacuuuuuuuucuuuuuuugaaauaaaauagccugucuuucagaucucaaaggcucuuuucagagccaccaaaaaaaaaaaaaaaaaaaaaaaaaaaaaaaaaaaaaaaaaaaaaaaaaaaaaaaaaaaaaaaaaaaaaaaaaaaaaaaaaaaaaaaaaaaaaaaaaaaaa

SEQ ID NO: 9948 - RNA, 1653 nt, Artificial Sequence; identical to SEQ ID NO: 8438
  mRNA Design a-3 (hSL-A100) comprising derived and/or modified sequence from Pf(3D7)__XP_001351122.1__HsALB_Pf-CSP(199-377)_L(PVTN)_HBsAg (opt5)

SEQ ID NO: 9949 - RNA, 1350 nt, Artificial Sequence
  mRNA Design a-3 (hSL-A100) comprising derived and/or modified sequence from Pf(3D7)__XP_001351122.1__HsALB_Pf-CSP(19-272)_L(AAY)_Pf-CSP(346-3 75)_L(AAY)_Pf-CSP(310-327) (opt5)
aggagagggcgcuuggcuugcaaggacccugagcugcggcauugaagcacacccaacccaacucgacugaagucagccucacugaaccggaucugagaaucuucucucucugggcuugccagggcucuccgaaccuagcuagcauccucuucaauuccaacuagaaagcuuaccaugaagugggugaccuucaucagccugcucuuucuguucuccucugccuacagccuuuuucaggaguaucaaugcuacggcuccucuagcaacacaagaguccugaaugaacucaacuaugacaaugcugggacgaaccuguacaaugagcuugaaaugaacuauuacggaaaacaggagaauugguauucccugaagaaaaacucucggagccucggcgaaaaugaugacgggaacaaugaggauaacgagaagcugcgcaaacccaagcacaagaaacugaagcagccugccgacggaaauccggaucccaacgcgaauccuaacguugaccccaacgcuaauccuaacguggaucccaaugccaacccuaauguggacccgaacgccaaucccaacgcuaauccuaacgccaaucccaacgcuaauccuaacgccaaucccaacgcgaacccgaaugccaacccuaaugcuaaccccaaugccaacccuaaugcuaaccccaaugccaaccccaaugcgaacccuaaugccaacccgaaugcuaaccccaacgccaauccuaacgcuaaucccaacgccaauccuaacgucgaucccaaugccaacccgaaugcuaacccuaaugcgaaccccaaugccaacccuaaugcuaaccccaacgccaauccuaacgccaaucccaacgcuaauccgaacgccaauccuaacgcgaaucccaacgcuaaucccaacgccaauccuaacgccaauccgaacgcuaaucccaacgccaacccuaaugcuaaccccaaugccaacccuaaugcgaaccccgccgcuuacauuaaaccuggcuccgccaauaagcccaaagacgaacucgauuacgcuaacgacaucgagaagaagauuuguaaaauggaaaagugcagcgccgcguaugagccgucugauaaacauaucaaggaguaccugaauaaaauucagaacucccuuugaggacuagucccuguucccagagcccacuuuuuuuucuuuuuuugaaauaaaauagccugucuuucagaucucaaaggcucuuuucagagccaccaaaaaaaaaaaaaaaaaaaaaaaaaaaaaaaaaaaaaaaaaaaaaaaaaaaaaaaaaaaaaaaaaaaaaaaaaaaaaaaaaaaaaaaaaaaaaaaaaaaaa

SEQ ID NO: 9950 - RNA, 1398 nt, Artificial Sequence
  mRNA Design a-3 (hSL-A100) comprising derived and/or modified sequence from Pf(3D7)__XP_001351122.1__HsALB_Pf-CSP(19-272)_L(AAY)_Pf-CSP(346-3 75)_L(AAY)_Pf-CSP(310-327)_L(AAY)_PADRE (opt5)
aggagagggcgcuuggcuugcaaggacccugagcugcggcauugaagcacacccaacccaacucgacugaagucagccucacugaaccggaucugagaaucuucucucucugggcuugccagggcucuccgaaccuagcuagcauccucuucaauuccaacuagaaagcuuaccaugaagugggugaccuucaucagccugcucuuucuguucuccucugccuacagccuuuuucaggaguaucaaugcuacggcuccucuagcaacacaagaguccugaaugaacucaacuaugacaaugcugggacgaaccuguacaaugagcuugaaaugaacuauuacggaaaacaggagaauugguauucccugaagaaaaacucucggagccucggcgaaaaugaugacgggaacaaugaggauaacgagaagcugcgcaaacccaagcacaagaaacugaagcagccugccgacggaaauccggaucccaacgcgaauccuaacguugaccccaacgcuaauccuaacguggaucccaaugccaacccuaauguggacccgaacgccaaucccaacgcuaauccuaacgccaaucccaacgcuaauccuaacgccaaucccaacgcgaacccgaaugccaacccuaaugcuaaccccaaugccaacccuaaugcuaaccccaaugccaaccccaaugcgaacccuaaugccaacccgaaugcuaaccccaacgccaauccuaacgcuaaucccaacgccaauccuaacgucgaucccaaugccaacccgaaugcuaacccuaaugcgaaccccaaugccaacccuaaugcuaaccccaacgccaauccuaacgccaaucccaacgcuaauccgaacgccaauccuaacgcgaaucccaacgcuaaucccaacgccaauccuaacgccaauccgaacgcuaaucccaacgccaacccuaaugcuaaccccaaugccaacccuaaugcgaaccccgccgcuuacauuaaaccuggcuccgccaauaagcccaaagacgaacucgauuacgcuaacgacaucgagaagaagauuuguaaaauggaaaagugcagcgccgcguaugagccgucugauaaacauaucaaggaguaccugaauaaaauucagaacucccuugccgcuuaugccaaguucguggcugccuggacccugaaagccgcugcgugaggacuagucccuguucccagagcccacuuuuuuuucuuuuuuugaaauaaaauagccugucuuucagaucucaaaggcucuuuucagagccaccaaaaaaaaaaaaaaaaaaaaaaaaaaaaaaaaaaaaaaaaaaaaaaaaaaaaaaaaaaaaaaaaaaaaaaaaaaaaaaaaaaaaaaaaaaaaaaaaaaaaa

SEQ ID NO: 9951 - RNA, 1398 nt, Artificial Sequence
  mRNA Design a-3 (hSL-A100) comprising derived and/or modified sequence from Pf(3D7)__XP_001351122.1__HsALB_Pf-CSP(19-272)_L(AAY)_Pf-CSP(310-3 27)_L(AAY)_Pf-CSP(346-375)_L(AAY)_PADRE (opt5)
aggagagggcgcuuggcuugcaaggacccugagcugcggcauugaagcacacccaacccaacucgacugaagucagccucacugaaccggaucugagaaucuucucucucugggcuugccagggcucuccgaaccuagcuagcauccucuucaauuccaacuagaaagcuuaccaugaagugggugaccuucaucagccugcucuuucuguucuccucugccuacagccuuuuucaggaguaucaaugcuacggcuccucuagcaacacaagaguccugaaugaacucaacuaugacaaugcugggacgaaccuguacaaugagcuugaaaugaacuauuacggaaaacaggagaauugguauucccugaagaaaaacucucggagccucggcgaaaaugaugacgggaacaaugaggauaacgagaagcugcgcaaacccaagcacaagaaacugaagcagccugccgacggaaauccggaucccaacgcgaauccuaacguugaccccaacgcuaauccuaacguggaucccaaugccaacccuaauguggacccgaacgccaaucccaacgcuaauccuaacgccaaucccaacgcuaauccuaacgccaaucccaacgcgaacccgaaugccaacccuaaugcuaaccccaaugccaacccuaaugcuaaccccaaugccaaccccaaugcgaacccuaaugccaacccgaaugcuaaccccaacgccaauccuaacgcuaaucccaacgccaauccuaacgucgaucccaaugccaacccgaaugcuaacccuaaugcgaaccccaaugccaacccuaaugcuaaccccaacgccaauccuaacgccaaucccaacgcuaauccgaacgccaauccuaacgcgaaucccaacgcuaaucccaacgccaauccuaacgccaauccgaacgcuaaucccaacgccaacccuaaugcuaaccccaaugccaacccuaaugcgaaccccgccgcuuacgaaccuuccgacaaacauauuaaggaguaccucaauaaaauccagaacagccuggccgcuuauauuaagcccggcucugccaauaagccgaaagaugaacuugacuacgcgaacgauaucgagaagaaaauuuguaagauggagaaaugcuccgccgcuuaugccaaguucguggcugccuggacccugaaagccgcugcgugaggacuagucccuguucccagagcccacuuuuuuuucuuuuuuugaaauaaaauagccugucuuucagaucucaaaggcucuuuucagagccaccaaaaaaaaaaaaaaaaaaaaaaaaaaaaaaaaaaaaaaaaaaaaaaaaaaaaaaaaaaaaaaaaaaaaaaaaaaaaaaaaaaaaaaaaaaaaaaaaaaaaa

SEQ ID NO: 9952 - RNA, 1452 nt, Artificial Sequence
  mRNA Design a-3 (hSL-A100) comprising derived and/or modified sequence from Pf(3D7)__XP_001351122.1__HsALB_Pf-CSP(19-272)_L(AAY)_Pf-CSP(310-3 27)_L(AAY)_Pf-CSP(346-375)_L(AAY)_PADRE_L(AAY)_P2 (opt5)
aggagagggcgcuuggcuugcaaggacccugagcugcggcauugaagcacacccaacccaacucgacugaagucagccucacugaaccggaucugagaaucuucucucucugggcuugccagggcucuccgaaccuagcuagcauccucuucaauuccaacuagaaagcuuaccaugaagugggugaccuucaucagccugcucuuucuguucuccucugccuacagccuuuuucaggaguaucaaugcuacggcuccucuagcaacacaagaguccugaaugaacucaacuaugacaaugcugggacgaaccuguacaaugagcuugaaaugaacuauuacggaaaacaggagaauugguauucccugaagaaaaacucucggagccucggcgaaaaugaugacgggaacaaugaggauaacgagaagcugcgcaaacccaagcacaagaaacugaagcagccugccgacggaaauccggaucccaacgcgaauccuaacguugaccccaacgcuaauccuaacguggaucccaaugccaacccuaauguggacccgaacgccaaucccaacgcuaauccuaacgccaaucccaacgcuaauccuaacgccaaucccaacgcgaacccgaaugccaacccuaaugcuaaccccaaugccaacccuaaugcuaaccccaaugccaaccccaaugcgaacccuaaugccaacccgaaugcuaaccccaacgccaauccuaacgcuaaucccaacgccaauccuaacgucgaucccaaugccaacccgaaugcuaacccuaaugcgaaccccaaugccaacccuaaugcuaaccccaacgccaauccuaacgccaaucccaacgcuaauccgaacgccaauccuaacgcgaaucccaacgcuaaucccaacgccaauccuaacgccaauccgaacgcuaaucccaacgccaacccuaaugcuaaccccaaugccaacccuaaugcgaaccccgccgcuuacgaaccuuccgacaaacauauuaaggaguaccucaauaaaauccagaacagccuggccgcuuauauuaagcccggcucugccaauaagccgaaagaugaacuugacuacgcgaacgauaucgagaagaaaauuuguaagauggagaaaugcuccgccgcuuaugccaaguucguggcugccuggacccugaaagccgcugcggccgcuuaccaauauaucaaggccaauagcaaguuuaucgggauuacagaacucugaggacuagucccuguucccagagcccacuuuuuuuucuuuuuuugaaauaaaauagccugucuuucagaucucaaaggcucuuuucagagccaccaaaaaaaaaaaaaaaaaaaaaaaaaaaaaaaaaaaaaaaaaaaaaaaaaaaaaaaaaaaaaaaaaaaaaaaaaaaaaaaaaaaaaaaaaaaaaaaaaaaaa

SEQ ID NO: 9953 - RNA, 1416 nt, Artificial Sequence
  mRNA Design a-3 (hSL-A100) comprising derived and/or modified sequence from Pf(3D7)__XP_001351122.1__HsALB_Pf-CSP(19-272)_L(AAY)_Pf-CSP(310-3 27)_Linker (AAY)_Pf-CSP(346-397) (opt5)
aggagagggcgcuuggcuugcaaggacccugagcugcggcauugaagcacacccaacccaacucgacugaagucagccucacugaaccggaucugagaaucuucucucucugggcuugccagggcucuccgaaccuagcuagcauccucuucaauuccaacuagaaagcuuaccaugaagugggugaccuucaucagccugcucuuucuguucuccucugccuacagccuuuuucaggaguaucaaugcuacggcuccucuagcaacacaagaguccugaaugaacucaacuaugacaaugcugggacgaaccuguacaaugagcuugaaaugaacuauuacggaaaacaggagaauugguauucccugaagaaaaacucucggagccucggcgaaaaugaugacgggaacaaugaggauaacgagaagcugcgcaaacccaagcacaagaaacugaagcagccugccgacggaaauccggaucccaacgcgaauccuaacguugaccccaacgcuaauccuaacguggaucccaaugccaacccuaauguggacccgaacgccaaucccaacgcuaauccuaacgccaaucccaacgcuaauccuaacgccaaucccaacgcgaacccgaaugccaacccuaaugcuaaccccaaugccaacccuaaugcuaaccccaaugccaaccccaaugcgaacccuaaugccaacccgaaugcuaaccccaacgccaauccuaacgcuaaucccaacgccaauccuaacgucgaucccaaugccaacccgaaugcuaacccuaaugcgaaccccaaugccaacccuaaugcuaaccccaacgccaauccuaacgccaaucccaacgcuaauccgaacgccaauccuaacgcgaaucccaacgcuaaucccaacgccaauccuaacgccaauccgaacgcuaaucccaacgccaacccuaaugcuaaccccaaugccaacccuaaugcgaaccccgccgcuuacgaaccuuccgacaaacauauuaaggaguaccucaauaaaauccagaacagccuggccgcuuauauuaagcccggcucugccaauaagccgaaagaugaacuugacuacgcgaacgauaucgagaagaaaauuuguaagauggagaaaugcuccagcguguucaauguugugaacucuuccaucgggcugaucaugguccucagcuuucuguuccuuaauugaggacuagucccuguucccagagcccacuuuuuuuucuuuuuuugaaauaaaauagccugucuuucagaucucaaaggcucuuuucagagccaccaaaaaaaaaaaaaaaaaaaaaaaaaaaaaaaaaaaaaaaaaaaaaaaaaaaaaaaaaaaaaaaaaaaaaaaaaaaaaaaaaaaaaaaaaaaaaaaaaaaaa

SEQ ID NO: 9954 - RNA, 2016 nt, Artificial Sequence
  mRNA Design a-3 (hSL-A100) comprising derived and/or modified sequence from Pf(3D7)__XP_001351122.1__LumSynt_L(GGS4-GGG)_Pf-CSP(19-397) (opt6)
aggagagggcgcuuggcuugcaaggacccugagcugcggcauugaagcacacccaacccaacucgacugaagucagccucacugaaccggaucugagaaucuucucucucugggcuugccagggcucuccgaaccuagcuagcauccucuucaauuccaacuagaaagcuuaccaugcaaauauacgaaggaaaacuaacagcagaaggauuacgauucggcauaguagcaucaagguucaaccacgcauuaguagauagacuaguagaaggagcaauagacgcaauaguccgacauggaggacgagaagaagauauaacacuagucagaguaccagggagcugggaaaucccaguagcagcaggagaacucgcaagaaaagaagauaucgacgccguaaucgcaaucgggguacuaauaagaggcgcaacaccccauuucgacuacauagcaagcgaaguaucaaaaggauuagcagaccuaaguuuagaacuaagaaaaccuauuacauucggcgucauaacggcagacacauuagaacaagccaucgaaagagcaggaacaaaacacggaaacaaaggcugggaagcagcacuaagcgcaauugaaauggcaaauuuauucaaaucccuaagaggcggcucagguggcaguggaggaucaggaggaucaggaggaggccuauuccaagaauaucaaugcuacggaucgagcucgaauacacgcguauuaaacgaauuaaacuacgacaacgcaggaacaaaccuauacaacgaacuagaaaugaacuauuauggaaaacaagagaacugguacucccuaaaaaaaaacagucgaagcuuaggagaaaaugacgacggaaauaacgaagacaacgaaaaacuaagaaaacccaaacauaaaaaauuaaaacaacccgcugacggaaacccagacccaaacgcuaacccgaacguugauccaaaugcaaacccaaauguggauccaaaugcaaaccccaacguagauccaaaugcaaacccaaacgcaaaccccaaugccaacccaaacgccaacccuaaugcuaauccaaacgcaaacccaaacgcaaacccgaacgcaaauccaaacgcaaacccuaaugcuaacccaaaugcaaauccaaacgcaaacccaaacgcuaacccaaacgcaaacccaaaugcaaacccaaaugcaaacccaaacgcaaauccaaacguagacccaaacgcaaauccaaacgcaaauccaaacgcaaacccaaacgccaaccccaaugcaaauccgaacgcaaacccaaacgcaaacccaaacgcaaacccaaacgcaaacccaaaugccaacccaaacgcaaacccgaacgcaaacccaaacgcaaacccaaacgcaaacccuaaugcgaacccaaaugccaacccaaacgcaaaccccaacgcuaacccaaacaaaaacaaucaaggaaacggacaagggcacaacaugccaaacgauccaaacagaaaugucgacgaaaacgccaaugcaaacagugccguaaaaaauaauaacaacgaagaaccuucagacaaacacauaaaagaauacuuaaacaaaauacaaaacucauuaucaaccgaauggagcccauguucuguuacaugcggaaauggaauacaaguaagaauaaaaccaggaucagcaaacaaaccaaaagacgaauuagacuacgcaaaugauauagaaaaaaaaauaugcaagauggaaaaaugcaguucuguauuuaacguaguaaacagcucaauaggucuaauaaugguacuauccuuucuuuuccugaacuaaggacuagucccuguucccagagcccacuuuuuuuucuuuuuuugaaauaaaauagccugucuuucagaucucaaaggcucuuuucagagccaccaaaaaaaaaaaaaaaaaaaaaaaaaaaaaaaaaaaaaaaaaaaaaaaaaaaaaaaaaaaaaaaaaaaaaaaaaaaaaaaaaaaaaaaaaaaaaaaaaaaaa

SEQ ID NO: 9955 - RNA, 1878 nt, Artificial Sequence
  mRNA Design a-3 (hSL-A100) comprising derived and/or modified sequence from Pf(3D7)__XP_001351122.1__HsALB_Pf-CSP(19-272)_L(PVTN)_HBsAg (opt6)
aggagagggcgcuuggcuugcaaggacccugagcugcggcauugaagcacacccaacccaacucgacugaagucagccucacugaaccggaucugagaaucuucucucucugggcuugccagggcucuccgaaccuagcuagcauccucuucaauuccaacuagaaagcuuaccaugaaauggguaaccuucaucucacuauuauucuuauuuucaucugcauacucacucuuccaagaauaccaaugcuacgguucaucuucuaacacaagaguacuaaacgaacuaaacuacgacaacgcaggaacaaaccucuauaacgaacuugaaaugaacuacuauggaaaacaagaaaacugguauucccuaaaaaaaaacucaagauccuuaggagaaaacgacgacggaaauaacgaagacaacgaaaaacuaagaaaaccaaaacacaaaaaacuaaaacaacccgcagacggaaacccagacccaaacgcaaacccaaacguagacccaaacgcaaacccaaacgucgacccaaacgccaauccaaacguagacccaaacgcuaacccaaacgccaauccaaacgcaaauccaaaugccaacccaaacgcaaacccaaaugcgaauccaaaugcaaaccccaaugcaaacccaaacgcaaauccaaacgcaaacccaaacgcaaacccuaacgcaaauccaaaugcaaacccuaacgcaaacccaaacgcaaauccaaacgcaaacccaaaugcaaauccaaacgucgacccaaacgcaaacccgaacgcaaacccaaacgcaaacccaaaugcaaauccaaaugcaaaccccaaugcaaacccaaacgcaaacccaaacgcuaacccaaaugcaaacccaaacgcaaacccaaacgcaaauccaaacgcaaacccaaacgcaaacccaaaugcaaacccaaacgcaaaccccaaugcaaauccaaacgcaaacccaaacgcaaacccacccguaaccaacauggaaaacaucacaucaggauuccuuggaccccucuuaguacuucaagcaggauucuuccuauuaacaagaauacuaacaauaccucaaucuuuagauucaugguggacuucauuaaauuuccuaggaggaagcccaguaugcuuaggacaaaacagccaaucaccaaccucaaaccacucaccaaccucaugcccaccaauaugcccaggauaccgauggaugugccuaagaagauucauaauauucuuauucauacuacuacuaugccucauauucuuacuaguacuauuagacuaccaaggaaugcugccagucugcccacuuauaccagguagcaccaccacuaacacaggaccuugcaaaacaugcacaacacccgcucaaggaaauucuauguuuccaucaugcugcugcacuaaacccacagauggcaauuguacaugcauaccaauccccucaucaugggcauuugccaaauacuuaugggaaugggcaucuguaagauucucuuggcuaucacucuuaguaccauucguacaaugguucguaggccuauccccuacaguauggcuauccgcaauauggaugaugugguacuggggaccaucacuauacucaauagucucacccuucauaccacuauuaccaauauucuucugccuauggguauauauauaaggacuagucccuguucccagagcccacuuuuuuuucuuuuuuugaaauaaaauagccugucuuucagaucucaaaggcucuuuucagagccaccaaaaaaaaaaaaaaaaaaaaaaaaaaaaaaaaaaaaaaaaaaaaaaaaaaaaaaaaaaaaaaaaaaaaaaaaaaaaaaaaaaaaaaaaaaaaaaaaaaaaa

SEQ ID NO: 9956 - RNA, 1995 nt, Artificial Sequence
  mRNA Design a-3 (hSL-A100) comprising derived and/or modified sequence from Pf(3D7)__XP_001351122.1__HsALB_Pf-CSP(19-272)_L(AAY)_Pf-CSP(346-3 65)_L(AAY)_PADRE_L(PVTN)_HBsAg (opt6)
aggagagggcgcuuggcuugcaaggacccugagcugcggcauugaagcacacccaacccaacucgacugaagucagccucacugaaccggaucugagaaucuucucucucugggcuugccagggcucuccgaaccuagcuagcauccucuucaauuccaacuagaaagcuuaccaugaaaugggucaccuucauuuccuuauuauucuuauuuucguccgcauacucacuauuucaagaauaucaauguuacggaucaagcucaaacacccgcguacucaacgaacuaaacuacgacaacgcaggaacaaaccuauauaacgaacuagaaaugaauuauuacggaaaacaagaaaacugguauucacuuaaaaaaaacuccagaucccuuggcgaaaacgacgacggaaauaaugaagacaacgaaaaacuuagaaaaccaaaacauaaaaaacuaaaacaaccugcagacgguaacccagauccaaaugcuaacccaaauguagacccuaacgcuaacccaaacguagauccaaacgccaacccaaacguagauccaaacgcaaacccaaacgcaaauccaaaugcaaacccaaacgccaaccccaacgcaaacccaaaugcaaauccuaaugcaaaucccaacgcaaauccaaacgcaaauccaaaugcaaaccccaacgcaaacccaaaugcaaauccaaaugcaaauccaaaugcaaacccaaacgcaaacccaaaugcaaauccuaacgcaaacccaaacgucgaccccaacgcaaauccaaacgcaaacccaaacgcaaaccccaaugcaaacccaaaugcaaacccaaacgcaaacccaaacgcaaaccccaacgcaaauccaaacgcaaauccaaaugcaaauccaaacgcaaaccccaaugcaaaccccaaugcuaacccaaacgccaaucccaacgcaaacccaaacgcaaaucccaacgcaaauccaaacgcaaacccugcagcauacauaaaacccggcucugcuaauaaacccaaagaugaacucgacuaugccaacgacauagaagcagccuacgcaaaauucguagcugcauggacauuaaaagcagcagcaccagugacaaacauggaaaacauuacaucaggauucuuagguccauuauuaguccuccaagcaggauucuucuuacuaacuagaauauuaacaauaccacaaucccuagacucuugguggacuucacuaaauuuccuaggaggauccccaguaugucucggucaaaauucucaaucaccuacaucaaaccauucaccaacaagcugccccccaaucugucccggauacagauggaugugccuacgcagauucauuauauuucuauucauacuacuucuaugccuaauauuccuacuaguccuucuagacuaccaaggaaugcuacccguaugcccacuuauaccaggauccacaacaacaaacacagguccaugcaaaacaugcacaacaccagcccaagguaauucuauguucccaucaugcuguugcacaaaaccaacagacgguaacugcacaugcaucccaauacccucaucaugggcauucgcaaaauaccuaugggaaugggcuucaguaagauucuccugguuaucccuuuuagucccauucguacaaugguucguaggauuaucacccacuguauggcuaucagcaauauggaugaugugguauuggggcccaucucuuuacucaaucgucuccccuuuuauuccacuacuacccauauuuuucugccuauggguauacauuuaaggacuagucccuguucccagagcccacuuuuuuuucuuuuuuugaaauaaaauagccugucuuucagaucucaaaggcucuuuucagagccaccaaaaaaaaaaaaaaaaaaaaaaaaaaaaaaaaaaaaaaaaaaaaaaaaaaaaaaaaaaaaaaaaaaaaaaaaaaaaaaaaaaaaaaaaaaaaaaaaaaaaa

SEQ ID NO: 9957 - RNA, 2214 nt, Artificial Sequence
  mRNA Design a-3 (hSL-A100) comprising derived and/or modified sequence from Pf(3D7)__XP_001351122.1__HsALB_Pf-CSP(19-384)_L(PVTN)_HBsAg (opt6)
aggagagggcgcuuggcuugcaaggacccugagcugcggcauugaagcacacccaacccaacucgacugaagucagccucacugaaccggaucugagaaucuucucucucugggcuugccagggcucuccgaaccuagcuagcauccucuucaauuccaacuagaaagcuuaccaugaaauggguaaccuucauaucucucuuauuccuuuuuucaucugcauauucacuauuucaagaauaucaauguuauggaucaucaucaaacacccgaguacucaacgaauuaaauuacgacaacgcagguacuaacuuauacaacgaauuagaaaugaauuacuauggaaaacaagaaaacugguauucccucaaaaaaaacucucgaucucuaggcgaaaacgacgacggcaacaacgaagacaacgaaaaacuacguaaacccaaacacaaaaaacuaaaacaaccagcagauggaaacccagacccaaacgcaaacccaaacguagacccaaacgcaaauccaaacguagacccgaacgcaaauccaaauguagaucccaaugcuaauccaaaugccaacccaaacgcaaacccuaacgcuaaucccaacgcaaacccaaacgcaaacccaaaugcaaacccaaacgcaaaccccaacgcaaacccaaaugcaaauccaaaugcaaauccaaacgccaacccaaaugccaacccaaacgcaaauccaaacgcuaaccccaacgcaaaccccaacgccaaucccaacguagaccccaacgcaaacccaaaugcaaauccaaacgcaaaccccaaugcaaacccaaacgcuaacccuaaugcaaacccaaacgccaacccaaaugcaaaccccaacgccaacccaaacgcaaauccaaacgcaaacccaaacgcuaacccaaacgccaacccaaacgcaaacccaaacgcuaacccaaacgcaaacccaaaugcaaacccaaaugcuaauccaaauaaaaacaaccaaggaaacggccaaggacauaauaugccuaacgacccaaacagaaacguagacgaaaaugcaaacgcaaacuccgcaguaaaaaauaacaauaacgaagaacccuccgacaaacauauaaaagaauaucuaaacaaaauacaaaauucacucucuacugaaugguccccaugcucaguaacauguggaaacggaauccaaguacgcauaaaaccaggaucagcaaacaaaccaaaagacgaacuagacuacgcaaacgauauagaaaaaaaaauaugcaaaauggaaaaaugcuccuccguauucaacguagucaauucaucuccaguaaccaauauggaaaauauaaccuccggauuccuaggaccacuacucguuuuacaagcaggauucuucuuacuaacaagaauacucacuauaccacaaucccuggauucuugguggacaucccuaaauuucuuaggcggaucacccguaugccuaggccaaaauagccaaaguccaacuucaaaccacuccccaacuucuugcccaccaauaugccccggcuacagauggaugugccuucgacgauucauaauauuucuauucauacuauuacuaugucuaauauuccuacucguucuauuagacuaccaaggaauguuaccaguuugcccacuaauaccugguucaacaaccacuaacacuggucccugcaaaacauguaccaccccagcccaaggaaacucaauguuccccucaugcuguugcacaaaaccaaccgacggaaauugcacaugcauacccauaccaucuucuugggcauuugcuaaauaucuaugggaaugggcaucaguacgcuucucauggcuaucucuacuaguaccauucguccaaugguucguaggccuaucaccaacaguauggcuaucugcaauauggaugaugugguacuggggucccuccuuauauucaauuguaucaccuuuuaucccacuccuacccauauucuucuguuuauggguauacauauaaggacuagucccuguucccagagcccacuuuuuuuucuuuuuuugaaauaaaauagccugucuuucagaucucaaaggcucuuuucagagccaccaaaaaaaaaaaaaaaaaaaaaaaaaaaaaaaaaaaaaaaaaaaaaaaaaaaaaaaaaaaaaaaaaaaaaaaaaaaaaaaaaaaaaaaaaaaaaaaaaaaaa

SEQ ID NO: 9958 - RNA, 2031 nt, Artificial Sequence
  mRNA Design a-3 (hSL-A100) comprising derived and/or modified sequence from Pf(3D7)__XP_001351122.1__HsALB_Pf-CSP(19-384)_L(SGG)_Ferritin (opt6)
aggagagggcgcuuggcuugcaaggacccugagcugcggcauugaagcacacccaacccaacucgacugaagucagccucacugaaccggaucugagaaucuucucucucugggcuugccagggcucuccgaaccuagcuagcauccucuucaauuccaacuagaaagcuuaccaugaaauggguaacauuuauaucucuauuauucuuauucuccucagcauacucacucuuucaagaauaccaaugcuacgguucuucauccaacacacgaguccuaaacgaauuaaacuacgacaaugcaggaaccaaucuauacaaugaacuugaaaugaacuacuacggaaaacaagaaaacugguacucccuaaaaaaaaacucacgaagccuaggagaaaaugacgacggaaacaacgaagacaacgaaaaacuacgaaaacccaaacacaaaaaacuaaaacaacccgccgacggcaauccagauccaaacgcaaacccaaacguagaccccaacgccaacccaaacguagauccaaacgcaaauccaaauguugauccaaaugcaaaccccaacgcaaacccaaacgcaaacccaaacgcaaacccaaacgcaaacccaaacgcaaauccaaaugcaaaucccaacgcaaauccaaacgcaaauccaaaugcaaacccaaacgcuaaucccaacgcuaacccaaacgcaaacccaaacgcaaacccgaacgcuaacccaaacgcaaacccaaacgcaaaccccaacguagacccaaacgcaaacccaaacgcaaaccccaacgcaaacccaaacgcaaacccaaacgcaaaccccaacgcaaaccccaacgcaaacccaaacgccaaccccaaugcaaacccaaacgccaacccaaacgcaaacccaaacgcaaacccaaacgcaaacccaaacgcaaauccaaacgcaaacccaaacgcaaacccaaacgcaaacccaaaugcaaacccaaacaaaaacaaccaaggaaauggacaaggacacaacaugccaaacgacccaaaccguaacguagaugaaaaugccaacgcaaacucagccguaaaaaacaacaacaacgaagaaccuucagacaaacacauaaaagaauacuuaaacaaaauacaaaacucauuaucaacugaauggucccccuguucagucacaugcggaaauggaauacaaguaagaauuaaaccagguucagccaacaaaccaaaagacgaacuagacuacgcaaacgacauugaaaaaaaaauauguaaaauggaaaaauguaguucagucuucaacguaguaaacucaucauccggaggauuauccaaagacauaauaaaacucuuaaaugaacaaguaaacaaagaaaugaacucgagcaaccucuauaugucaaugucauccuggugcuacacccauucccuagacggcgccggacuauuccuguucgaccaugcagcagaagaauaugaacacgcaaaaaagcuaaucaucuucuuaaacgaaaacaaugucccaguacaacuaaccuccauaucagcaccugaacauaaauucgaaggacuaacacaaauauuucaaaaagcauacgaacacgaacaacacauaucagaaucaauuaauaacauaguagaccacgcaaucaaaagcaaggaccacgcaacauucaacuuucuacaaugguacguagcagaacaacaugaagaagaaguacucuucaaagacaucuuagacaaaauugaacucauaggaaacgaaaaucacggacucuaccucgcagaccaguacguaaaaggaaucgcaaaaucacguaaaagcuaaggacuagucccuguucccagagcccacuuuuuuuucuuuuuuugaaauaaaauagccugucuuucagaucucaaaggcucuuuucagagccaccaaaaaaaaaaaaaaaaaaaaaaaaaaaaaaaaaaaaaaaaaaaaaaaaaaaaaaaaaaaaaaaaaaaaaaaaaaaaaaaaaaaaaaaaaaaaaaaaaaaaa

SEQ ID NO: 9959 - RNA, 1992 nt, Artificial Sequence
  mRNA Design a-3 (hSL-A100) comprising derived and/or modified sequence from Pf(3D7)__XP_001351122.1__HsALB_Pf-CSP(93-384)_L(PVTN)_HBsAg (opt6)
aggagagggcgcuuggcuugcaaggacccugagcugcggcauugaagcacacccaacccaacucgacugaagucagccucacugaaccggaucugagaaucuucucucucugggcuugccagggcucuccgaaccuagcuagcauccucuucaauuccaacuagaaagcuuaccaugaaauggguaacuuuuauaucccuccuauuucuauuuucaucagccuauucaaaacuaaaacaacccgcagauggaaaucccgacccaaaugcaaauccaaauguagauccaaacgccaacccaaaugucgacccaaaugcaaacccaaacguagauccuaacgcaaacccaaaugcuaauccaaacgcuaacccaaacgcaaauccaaaugcuaacccaaacgcaaacccuaacgcaaacccaaacgcuaacccaaacgcaaacccaaacgccaacccaaacgcaaaccccaacgcaaacccuaacgcaaacccaaacgcaaacccaaaugccaacccaaacgcaaacccaaacgcaaacccaaacguagaccccaacgcuaauccaaaugcaaauccaaacgcaaacccaaaugccaacccaaacgccaacccuaaugcaaacccaaacgcaaacccaaaugcaaaccccaacgcaaauccaaacgcaaauccaaaugcaaacccaaacgcuaacccaaacgcaaaccccaaugcaaacccaaacgcaaauccaaaugcaaacccaaaugcaaauccaaaugcaaacccaaauaaaaacaaccaaggaaacggacaaggccauaacaugccaaacgacccaaaccgcaacgucgaugaaaacgccaacgcaaauucagcgguuaaaaacaacaacaaugaagaacccucagacaaacacauaaaagaauacuuaaacaaaauacaaaacucacuaucgacagaaugguccccaugcuccguaaccugcgguaauggaauacaagucagaauaaaaccaggaucagcuaauaaaccaaaagacgaauuagacuacgcaaacgacauagaaaagaaaauaugcaaaauggaaaaauguucuucaguauuuaacguagucaacucaucacccguaacuaacauggaaaacauaaccucaggauuucuagguccuuuacucguacuacaagcaggauuuuuccuacuuacccgaauccuaacaauaccucaaucucuagacucaugguggacaucccuaaauuucuuaggcggaucaccaguuugccucggacaaaacucucaaucaccaacuucaaaucacuccccaacaucuugcccaccaauaugcccaggauaucgauggaugugucuacgacguuuuauaauauuucuauuuauacuacuacucugucuaauauuccuauuaguacuacucgacuaucaaggaaugcuccccgucuguccccucauacccggaucaacaacuacaaacaccggaccgugcaaaaccugcacaaccccagcucaaggaaauucaauguucccaucaugcugcuguacaaaaccaacagauggaaacugcacaugcauaccaaucccaucaagcugggccuuugccaaauauuuaugggaaugggccuccgucagauucucauggcucucccuucuaguuccauucguacaaugguuuguaggccuauccccaaccguauggcuauccgccauauggaugaugugguauuggggaccaucacuauacucaauaguauccccauucauaccacuccuacccauauucuuuugccuauggguauacauuuaaggacuagucccuguucccagagcccacuuuuuuuucuuuuuuugaaauaaaauagccugucuuucagaucucaaaggcucuuuucagagccaccaaaaaaaaaaaaaaaaaaaaaaaaaaaaaaaaaaaaaaaaaaaaaaaaaaaaaaaaaaaaaaaaaaaaaaaaaaaaaaaaaaaaaaaaaaaaaaaaaaaaa

SEQ ID NO: 9960 - RNA, 1653 nt, Artificial Sequence
  mRNA Design a-3 (hSL-A100) comprising derived and/or modified sequence from Pf(3D7)__XP_001351122.1__HsALB_Pf-CSP(199-377)_L(PVTN)_HBsAg (opt6)
aggagagggcgcuuggcuugcaaggacccugagcugcggcauugaagcacacccaacccaacucgacugaagucagccucacugaaccggaucugagaaucuucucucucugggcuugccagggcucuccgaaccuagcuagcauccucuucaauuccaacuagaaagcuuaccaugaaauggguaacauucauaucauuacucuucuuauuuuccucugcauacucagauccaaaugcaaacccaaaugcaaacccaaacgcaaacccaaaugccaauccaaaugcaaacccaaaugcaaacccaaacgcaaacccaaacgcaaacccaaacgcaaacccuaaugcaaacccaaaugcaaauccaaacgcuaacccaaacgcaaacccaaaugccaacccaaacgccaauccaaacgcaaacccaaacgcaaaucccaaugcaaacccuaacaaaaacaaucaaggaaacggacaaggccacaacaugccaaaugacccaaaccgcaauguagacgaaaaugccaacgcaaacuccgcuguaaaaaacaauaacaacgaagaaccuuccgauaaacauauaaaagaauacuuaaauaaaauacaaaauucauuaucaacagaauggucaccaugcucagucacaugcggaaauggaauacaaguaagaauaaaacccgguuccgcaaacaaaccaaaagacgaacuagacuacgcaaaugacaucgaaaaaaaaauaugcaaaauggaaaaauguucuucaguaccaguaacaaacauggaaaacaucaccucuggauuccuaggaccacuauuaguacuacaagcaggauucuuccuccuaacaagaauauuaacaauaccacaaucacuugacucaugguggacaucccucaauuuccuaggaggauccccaguaugucuaggucaaaacucucaaucuccaacauccaaccauucacccacaucaugcccucccauaugcccaggauaccgauggaugugccucagaagauucauaauauuccuauucauauuacuccuauguuuaaucuuucuacuagucuuauuagacuaccaaggaaugcuaccaguaugcccacuaaucccaggauccacaacaacaaacacaggccccugcaaaacauguacaacaccagcacaaggaaacucaauguucccaucaugcuguugcacaaaaccaacagacggaaacugcacaugcaucccaauaccaucaucuugggcauuugcaaaauacuuaugggaaugggcaucaguacgcuuuucauggcucucccuccucguaccauucguccaaugguucguaggucuaucaccaacaguuuggcuauccgcuauauggaugaugugguauuggggcccuucccuauacucaauaguuucaccauuuauaccacuccuaccaauauuuuucugccuuuggguauacauauaaggacuagucccuguucccagagcccacuuuuuuuucuuuuuuugaaauaaaauagccugucuuucagaucucaaaggcucuuuucagagccaccaaaaaaaaaaaaaaaaaaaaaaaaaaaaaaaaaaaaaaaaaaaaaaaaaaaaaaaaaaaaaaaaaaaaaaaaaaaaaaaaaaaaaaaaaaaaaaaaaaaaa

SEQ ID NO: 9961 - RNA, 1350 nt, Artificial Sequence
  mRNA Design a-3 (hSL-A100) comprising derived and/or modified sequence from Pf(3D7)__XP_001351122.1__HsALB_Pf-CSP(19-272)_L(AAY)_Pf-CSP(346-3 75)_L(AAY)_Pf-CSP(310-327) (opt6)
aggagagggcgcuuggcuugcaaggacccugagcugcggcauugaagcacacccaacccaacucgacugaagucagccucacugaaccggaucugagaaucuucucucucugggcuugccagggcucuccgaaccuagcuagcauccucuucaauuccaacuagaaagcuuaccaugaaauggguaaccuucauuucacuucucuuccuauucuccagcgcauacucacucuuccaagaauaccaaugcuacggcucaaguuccaacacacgaguacuaaacgaauuaaacuacgacaaugcuggaaccaaccuauacaacgaacucgaaaugaacuacuacgguaaacaagaaaacugguauucacuaaaaaaaaacucaaggucccuaggagaaaacgacgacggaaacaacgaagacaacgaaaaauuaagaaaaccaaaacacaaaaaacuaaaacaacccgcagacggaaaccccgacccaaacgcaaacccaaacguagauccaaacgcaaacccaaacguagacccaaacgcaaacccaaacguagacccaaacgcaaacccuaaugcaaacccaaacgcaaacccaaacgcaaacccaaacgcaaacccaaacgcaaacccaaacgcaaaccccaacgccaacccaaacgcaaacccaaacgcaaacccaaacgcaaacccaaacgcaaacccaaacgcaaacccaaacgcaaacccaaacgcaaacccaaaugcaaacccaaacgcaaacccaaacguagacccaaacgcaaacccaaacgcaaacccaaaugcaaacccaaacgcaaacccaaacgcaaacccaaacgcuaacccaaacgcaaacccaaacgcuaauccaaaugcuaaccccaacgcaaacccaaaugcaaacccaaacgcuaauccaaaugcaaauccaaacgcaaacccaaacgcaaacccaaacgcaaacccaaacgcaaacccaaacgcaaauccagccgcauacauaaaacccggcucagcaaacaaaccaaaagacgaacuagacuacgccaacgacauagaaaaaaaaauaugcaaaauggaaaaaugcucagccgcauacgaaccaucagacaaacacaucaaagaauacuuaaacaaaauacaaaacagcuuauaaggacuagucccuguucccagagcccacuuuuuuuucuuuuuuugaaauaaaauagccugucuuucagaucucaaaggcucuuuucagagccaccaaaaaaaaaaaaaaaaaaaaaaaaaaaaaaaaaaaaaaaaaaaaaaaaaaaaaaaaaaaaaaaaaaaaaaaaaaaaaaaaaaaaaaaaaaaaaaaaaaaaa

SEQ ID NO: 9962 - RNA, 1398 nt, Artificial Sequence
  mRNA Design a-3 (hSL-A100) comprising derived and/or modified sequence from Pf(3D7)__XP_001351122.1__HsALB_Pf-CSP(19-272)_L(AAY)_Pf-CSP(346-3 75)_L(AAY)_Pf-CSP(310-327)_L(AAY)_PADRE (opt6)
aggagagggcgcuuggcuugcaaggacccugagcugcggcauugaagcacacccaacccaacucgacugaagucagccucacugaaccggaucugagaaucuucucucucugggcuugccagggcucuccgaaccuagcuagcauccucuucaauuccaacuagaaagcuuaccaugaaauggguaacauucauaucacuacuauuccuauucucauccgccuacucacucuuucaagaauaucaaugcuacggaucaagcucaaauacaagaguacuaaacgaacuaaacuacgacaacgcaggaaccaaccuauacaacgaacuagaaaugaacuacuacggaaaacaagaaaacugguacucacuuaaaaaaaacucaagaucacuaggagaaaacgacgacggaaacaacgaagacaacgaaaaacuacgaaaaccaaaacauaaaaaacuaaaacaaccagcagacggaaacccagacccaaacgcaaauccaaacguagacccaaaugcaaacccaaacguagacccaaacgcaaacccaaacguagacccaaaugcaaacccaaacgcaaauccaaacgcaaacccaaacgcaaacccaaacgcaaacccaaacgcaaacccaaacgcaaacccaaaugcaaauccaaacgcaaacccaaaugcaaacccaaacgcaaacccaaacgcgaacccaaacgccaaccccaacgcaaacccaaacgcaaauccaaaugcaaacccaaacgccaauccaaacguagacccaaacgcaaauccaaacgcaaacccaaacgcaaacccaaacgcaaacccuaacgcaaacccaaacgcaaacccaaacgcaaacccaaacgccaacccaaacgcaaaccccaacgcaaacccaaacgcaaacccaaacgcaaaccccaacgcaaauccaaacgcuaacccaaacgcuaaccccaacgcaaacccaaaugcaaacccaaacgccaacccagccgcauacauaaaaccaggaucagcaaauaaaccaaaagacgaacuagacuacgcaaacgacauagaaaaaaaaauaugcaaaauggaaaaaugcuccgcagcauacgaaccaucagacaaacacaucaaagaauaccuaaacaaaauccaaaacucacuagccgccuacgcaaaauuugucgcagcauggacacucaaagcagcagcauaaggacuagucccuguucccagagcccacuuuuuuuucuuuuuuugaaauaaaauagccugucuuucagaucucaaaggcucuuuucagagccaccaaaaaaaaaaaaaaaaaaaaaaaaaaaaaaaaaaaaaaaaaaaaaaaaaaaaaaaaaaaaaaaaaaaaaaaaaaaaaaaaaaaaaaaaaaaaaaaaaaaaa

SEQ ID NO: 9963 - RNA, 1398 nt, Artificial Sequence
  mRNA Design a-3 (hSL-A100) comprising derived and/or modified sequence from Pf(3D7)__XP_001351122.1__HsALB_Pf-CSP(19-272)_L(AAY)_Pf-CSP(310-3 27)_L(AAY)_Pf-CSP(346-375)_L(AAY)_PADRE (opt6)
aggagagggcgcuuggcuugcaaggacccugagcugcggcauugaagcacacccaacccaacucgacugaagucagccucacugaaccggaucugagaaucuucucucucugggcuugccagggcucuccgaaccuagcuagcauccucuucaauuccaacuagaaagcuuaccaugaaauggguaaccuucauaucccuacuauuucuauucuccucagcauacucacuauuccaagaauaccaaugcuacggcucaucaucaaacacaagaguacuaaaugaacuaaacuacgacaacgccggaaccaaccuauacaaugaacucgaaaugaauuacuacggaaaacaagaaaacugguacucacuaaaaaaaaacucaagaagccuaggagaaaacgacgacggaaacaacgaagacaacgaaaaauuacgaaaaccaaaacauaaaaaacuaaaacaacccgccgacggaaacccagacccaaacgcaaacccaaacguagacccaaacgcaaauccaaacguagacccaaacgcaaauccaaauguagacccaaacgcaaacccaaacgcaaacccaaacgcaaacccaaacgcaaacccgaacgcaaauccaaacgcaaacccaaacgcaaacccaaacgcaaacccaaacgcaaacccaaacgcaaaccccaacgcaaacccaaaugcaaacccaaacgcaaacccaaaugcaaauccaaacgcaaacccaaacgcaaacccaaacgcaaacccaaacguagacccaaaugcaaaccccaacgcaaacccaaacgcaaacccaaacgcaaacccaaacgcaaacccaaacgcaaacccaaacgcaaacccaaacgcaaacccaaacgccaauccaaacgcaaauccaaacgcaaacccaaacgcaaacccaaacgcaaacccaaacgcaaacccaaacgcaaacccaaacgcaaacccaaaugcaaacccaaacgcaaacccagcagcauacgaaccuucagacaaacacauaaaagaauacuuaaacaaaauacaaaacucacuagcagccuacaucaaaccaggauccgcaaacaaaccaaaagacgaacuagacuacgcaaacgacauagaaaaaaaaauauguaaaauggaaaaaugcucagccgcauaugcuaaauucgucgcagcauggaccuuaaaagcagcagcauaaggacuagucccuguucccagagcccacuuuuuuuucuuuuuuugaaauaaaauagccugucuuucagaucucaaaggcucuuuucagagccaccaaaaaaaaaaaaaaaaaaaaaaaaaaaaaaaaaaaaaaaaaaaaaaaaaaaaaaaaaaaaaaaaaaaaaaaaaaaaaaaaaaaaaaaaaaaaaaaaaaaaa

SEQ ID NO: 9964 - RNA, 1452 nt, Artificial Sequence
  mRNA Design a-3 (hSL-A100) comprising derived and/or modified sequence from Pf(3D7)__XP_001351122.1__HsALB_Pf-CSP(19-272)_L(AAY)_Pf-CSP(310-3 27)_L(AAY)_Pf-CSP(346-375)_L(AAY)_PADRE_L(AAY)_P2 (opt6)
aggagagggcgcuuggcuugcaaggacccugagcugcggcauugaagcacacccaacccaacucgacugaagucagccucacugaaccggaucugagaaucuucucucucugggcuugccagggcucuccgaaccuagcuagcauccucuucaauuccaacuagaaagcuuaccaugaaaugggucaccuucaucucacuacuauuuuuauucuccagcgcauacucauuauuccaagaauaccaaugcuauggcucaagcucaaacacaagaguauuaaacgaacuaaacuacgauaacgccggaacaaaccuauacaacgaacucgaaaugaacuacuauggaaaacaagaaaacugguacucacuuaaaaaaaauucaagaucucuaggagaaaacgacgacggaaacaaugaagacaacgagaaauuaagaaaaccaaaacacaaaaaacuaaaacaaccagcagacggaaacccagacccaaacgcaaacccaaacguagacccaaacgcaaacccaaacguagacccaaacgcaaacccaaacguagauccgaacgcaaauccaaacgcaaauccaaacgcaaacccaaaugcaaacccaaaugcaaacccaaaugcaaacccaaacgcaaacccaaacgcaaacccaaacgcaaaccccaacgcaaacccaaacgcaaauccaaacgcaaacccaaacgcaaacccaaacgcaaaccccaacgcaaacccaaacgcaaacccgaacgcgaacccaaacguggauccaaacgcaaacccaaaugcaaaucccaacgcaaacccaaaugcaaacccaaacgcaaacccaaacgcaaacccaaacgcaaacccaaaugcaaacccaaacgcaaacccaaacgcaaacccaaacgcaaacccaaacgcaaauccaaacgcaaauccaaaugcaaacccaaacgcaaacccaaacgcaaaccccaacgcaaauccaaacgcaaacccagccgcauacgaaccaucagacaaacauauaaaagaauaucuaaacaaaauucaaaacucacucgcagcauacauaaaaccaggaagcgcaaacaaaccuaaagacgaacuagacuacgcaaacgacauagaaaaaaaaauaugcaaaauggaaaaaugcucagcagcguacgcaaaauucguagcagcauggacacuaaaagcagcagccgcagcauaccaauacauaaaagcaaauucaaaauucaucggaauuacagaacuauaaggacuagucccuguucccagagcccacuuuuuuuucuuuuuuugaaauaaaauagccugucuuucagaucucaaaggcucuuuucagagccaccaaaaaaaaaaaaaaaaaaaaaaaaaaaaaaaaaaaaaaaaaaaaaaaaaaaaaaaaaaaaaaaaaaaaaaaaaaaaaaaaaaaaaaaaaaaaaaaaaaaaa

SEQ ID NO: 9965 - RNA, 1416 nt, Artificial Sequence
  mRNA Design a-3 (hSL-A100) comprising derived and/or modified sequence from Pf(3D7)__XP_001351122.1__HsALB_Pf-CSP(19-272)_L(AAY)_Pf-CSP(310-3 27)_Linker (AAY)_Pf-CSP(346-397) (opt6)
aggagagggcgcuuggcuugcaaggacccugagcugcggcauugaagcacacccaacccaacucgacugaagucagccucacugaaccggaucugagaaucuucucucucugggcuugccagggcucuccgaaccuagcuagcauccucuucaauuccaacuagaaagcuuaccaugaaauggguuacauucauaucauuacuauuccucuuuuccucagcauacucacucuuucaagaauaccaaugcuacggcucauccucaaacacaagaguacucaacgaacucaacuaugacaacgcaggaacaaaccucuacaacgaacuugaaaugaauuacuauggaaaacaagaaaacugguacucauuaaaaaaaaacucaagauccuuaggcgaaaacgacgacggaaacaacgaagacaacgagaaacuccgaaaaccaaaacacaaaaaacuaaaacaaccagcagacggaaacccagacccaaacgcaaacccaaacguagacccaaacgcaaacccaaacguagacccaaacgcaaacccaaacguagacccaaacgcaaacccaaacgcaaacccaaacgcaaacccaaacgcaaacccaaacgcaaacccaaacgcaaacccaaacgcaaacccaaacgcaaacccaaacgcaaacccaaacgcaaacccaaacgccaacccaaacgcaaacccaaacgccaacccaaacgcaaacccaaacgcaaacccaaacgcaaauccaaacgccaacccaaacguagacccaaacgcaaacccaaacgcaaacccaaacgcaaacccaaacgcaaaccccaacgccaacccaaacgccaaccccaacgcaaauccaaacgcaaacccaaacgcaaaccccaacgcaaacccaaacgcaaacccaaacgcaaacccaaacgcuaacccaaacgcaaaccccaacgcaaauccaaacgcaaacccaaacgcaaacccaaaugcaaacccagcagcauaugaaccuucagauaaacacauaaaagaauaccuaaacaaaauccaaaacucucucgcagccuacaucaaaccaggaucagcaaacaaacccaaagacgaacuagacuacgcaaaugauaucgaaaaaaaaauaugcaaaauggaaaaaugcucgagcguauuuaacguaguaaacucaucaaucggacucauaaugguacuaucauuucuauuccucaacuaaggacuagucccuguucccagagcccacuuuuuuuucuuuuuuugaaauaaaauagccugucuuucagaucucaaaggcucuuuucagagccaccaaaaaaaaaaaaaaaaaaaaaaaaaaaaaaaaaaaaaaaaaaaaaaaaaaaaaaaaaaaaaaaaaaaaaaaaaaaaaaaaaaaaaaaaaaaaaaaaaaaaa

SEQ ID NO: 9966 - RNA, 2016 nt, Artificial Sequence
  mRNA Design a-3 (hSL-A100) comprising derived and/or modified sequence from Pf(3D7)__XP_001351122.1__LumSynt_L(GGS4-GGG)_Pf-CSP(19-397) (opt11)
aggagagggcgcuuggcuugcaaggacccugagcugcggcauugaagcacacccaacccaacucgacugaagucagccucacugaaccggaucugagaaucuucucucucugggcuugccagggcucuccgaaccuagcuagcauccucuucaauuccaacuagaaagcuuaccaugcaaauauacgagggcaaacucacggcugaaggccuacgcuuuggcaucgucgcaucacgguucaaucacgcacucguggacaggcucguagaaggugccaucgacgcaauaguacgccacggcgggcgcgaagaggacauaacgcuaguacgcguacccggaagcugggaaauccccguagccgcaggcgaacucgcacgcaaagaagacaucgacgccgugaucgcaauaggaguccugauccgaggcgcaacaccacacuucgacuacaucgccuccgaagucucaaaaggccuagcggaucugagccucgaacugcgcaaaccuauaacauucggcgucauaacagccgacacauuagaacaggccauagaaagagccggaaccaaacauggaaacaaaggcugggaagcggcccuaagcgccaucgaaauggcaaaccucuucaaaagccugcgcggaggaucaggcggcagcggcggcuccggaggaagcggcggcggucuuuuucaagaauaccaaugcuacggcuccucaucgaacacacgcguacucaaugaacugaacuacgacaaugcaggaaccaaccucuacaacgaacucgagaugaacuacuacggcaaacaagaaaacugguacucgcuaaagaaaaacuccagaucccugggcgaaaacgacgacggaaacaacgaagacaacgaaaaacuacgcaaaccaaaacacaagaaacuaaaacaaccagcagacggaaacccagacccaaacgcgaacccaaacgucgacccaaacgcaaacccaaacguagacccaaacgcaaacccaaacgucgaccccaacgcaaacccaaacgccaaccccaacgcaaaccccaacgcgaacccaaacgcgaaccccaacgcaaacccaaacgcaaaccccaacgcaaacccaaacgcaaacccaaacgccaacccgaaugccaacccgaacgcaaacccgaacgcaaaccccaacgcgaaccccaacgcaaacccaaaugccaaccccaacgcaaaccccaacguagacccgaacgcaaacccgaacgcaaacccgaacgcaaacccaaacgcaaacccaaacgccaaccccaacgccaacccaaacgcgaacccaaaugcaaaccccaacgccaacccgaacgccaacccaaacgcaaacccgaacgcaaaccccaacgcaaaccccaacgcaaaccccaacgcaaacccgaacgccaacccaaacgcaaacccaaacgcaaacccaaacaaaaacaaccaaggaaacgggcaaggccacaacaugcccaacgacccaaaccgaaauguagaugaaaacgcaaacgccaacagcgcggucaaaaacaacaacaacgaagaacccucggacaaacacauaaaagaauaccuaaacaaaauccagaacucccucucaacagaauggucccccugcucaguuaccugcgguaaugguauacaaguccgcauuaaaccgggaucugccaacaaaccaaaagaugagcuagacuacgccaacgacauagaaaagaaaaucugcaaaauggagaaaugcuccucagucuucaacguaguaaacagcucgauagggcucaucaugguacucuccuuuuuauuccucaacuaaggacuagucccuguucccagagcccacuuuuuuuucuuuuuuugaaauaaaauagccugucuuucagaucucaaaggcucuuuucagagccaccaaaaaaaaaaaaaaaaaaaaaaaaaaaaaaaaaaaaaaaaaaaaaaaaaaaaaaaaaaaaaaaaaaaaaaaaaaaaaaaaaaaaaaaaaaaaaaaaaaaaa

SEQ ID NO: 9967 - RNA, 1878 nt, Artificial Sequence
  mRNA Design a-3 (hSL-A100) comprising derived and/or modified sequence from Pf(3D7)__XP_001351122.1__HsALB_Pf-CSP(19-272)_L(PVTN)_HBsAg (opt11)
aggagagggcgcuuggcuugcaaggacccugagcugcggcauugaagcacacccaacccaacucgacugaagucagccucacugaaccggaucugagaaucuucucucucugggcuugccagggcucuccgaaccuagcuagcauccucuucaauuccaacuagaaagcuuaccaugaaaugggucaccuucaucucccuccucuuccucuucuccucugccuacucacucuuccaagaauaccaaugcuacggcuccucuuccaacacccgcguacucaacgaacucaacuaugacaaugcaggaaccaaccuauacaacgagcuagagaugaacuacuacggcaaacaagaaaacugguacucccucaagaaaaacucacgcucccuuggcgaaaaugacgacggcaacaacgaagacaacgaaaaacuucgcaaacccaaacacaagaaauuaaaacaaccagccgacggcaacccagaccccaacgccaaccccaacgucgaccccaacgccaacccuaacgucgaccccaacgcaaacccuaacgucgauccaaacgccaaccccaacgcuaaccccaacgcaaauccgaacgcaaaccccaacgccaacccuaacgccaaccccaacgccaacccaaacgccaaccccaacgcuaaccccaacgcaaacccgaacgccaaccccaacgccaaccccaacgcaaaccccaacgccaaccccaaugcaaaccccaacgccaacccaaaugccaaccccaacgucgaccccaacgcaaaccccaacgcuaacccuaacgcuaacccaaacgccaacccaaacgcuaaccccaacgccaaccccaacgccaaccccaacgcaaacccaaacgcaaacccuaacgccaacccuaacgcaaaccccaacgcgaaccccaacgcaaaccccaacgcaaaccccaacgccaaccccaacgccaacccaaacgccaauccaaacgcaaaucccccagucaccaacauggaaaacaucaccucaggcuuccucggcccccuucucguccuacaagcugguuucuuccuucuaacccgcauccucacgaucccccaaucccucgacucaugguggaccucacucaacuuucucggaggcucacccguaugccucggacaaaacucccaaucccccaccuccaaccauuccccaaccucaugcccaccaauaugccccggcuaccguuggaugugccuccgccguuucaucauauuccuuuucauacuccuccucugccucaucuuccugcucgugcuccuagacuaucaagguaugcuacccguaugcccacucauccccggcucaaccacgacaaacacuggccccugcaaaacaugcaccacacccgcacaaggaaacuccauguuccccucaugcugcugcaccaaaccaacagacggaaacuguaccugcaucccuauccccuccuccugggccuucgcaaaauaucuaugggagugggccagcguacgcuuuuccuggcuuucccuccugguccccuucguccaaugguucguaggccucuccccaaccguauggcuauccgcaaucuggaugaugugguacuggggcccaucucucuacucaauaguaucacccuucaucccacuccuccccaucuucuucugccucuggguauacaucuaaggacuagucccuguucccagagcccacuuuuuuuucuuuuuuugaaauaaaauagccugucuuucagaucucaaaggcucuuuucagagccaccaaaaaaaaaaaaaaaaaaaaaaaaaaaaaaaaaaaaaaaaaaaaaaaaaaaaaaaaaaaaaaaaaaaaaaaaaaaaaaaaaaaaaaaaaaaaaaaaaaaaa

SEQ ID NO: 9968 - RNA, 1995 nt, Artificial Sequence
  mRNA Design a-3 (hSL-A100) comprising derived and/or modified sequence from Pf(3D7)__XP_001351122.1__HsALB_Pf-CSP(19-272)_L(AAY)_Pf-CSP(346-3 65)_L(AAY)_PADRE_L(PVTN)_HBsAg (opt11)
aggagagggcgcuuggcuugcaaggacccugagcugcggcauugaagcacacccaacccaacucgacugaagucagccucacugaaccggaucugagaaucuucucucucugggcuugccagggcucuccgaaccuagcuagcauccucuucaauuccaacuagaaagcuuaccaugaaauggguaaccuucauaucccuucuauucuuauucucuuccgcauacucccucuuccaagaauaucagugcuacggcucauccucaaacacacgaguccucaacgaacucaacuacgacaacgccggcaccaaucucuacaacgaacucgaaaugaacuacuacggcaaacaagaaaacugguacucccuuaagaaaaacucacgcucucucggcgaaaacgacgacggcaacaacgaagacaacgaaaaauuacgcaaacccaaacacaagaaacucaaacaaccagccgacggcaacccagaccccaaugcaaacccuaacgucgaccccaacgccaacccuaacgucgacccaaacgccaacccgaacgucgaccccaacgcaaacccaaacgccaaccccaaugccaaucccaacgccaacccuaacgccaaccccaacgccaaccccaacgccaacccuaacgccaaccccaaugcaaacccaaacgccaacccaaacgcaaacccaaacgccaauccaaacgccaacccaaacgccaaccccaacgccaacccaaacgccaaucccaacgccaaccccaacguagaccccaaugcgaacccaaacgccaacccuaacgccaaccccaacgcaaacccaaacgcuaacccaaacgcaaaccccaacgcaaaccccaacgcaaacccgaacgcgaaccccaacgccaauccaaacgcaaacccuaacgcaaacccaaacgccaacccaaacgccaacccaaacgcaaacccaaacgccaauccaaacgcaaacccgaacgcaaaccccgccgcuuacaucaaacccggaucggccaacaaacccaaagacgaacuugauuacgccaacgacaucgaagcagccuacgcaaaauucguagcggccuggacccuaaaagcagcagcacccgucacaaacauggaaaacaucacaucuggcuucuuaggcccacuccuaguccuccaggccggcuucuuccuacuaacccguauacucaccauaccacaaucacucgacucaugguggaccucccuaaacuuccucggcggaucacccgucugccugggccaaaacucgcaaucccccaccucaaaucauucgcccacaucaugcccgcccaucugccccggcuaccgguggaugugccuccgcagauucauaaucuuccucuucauacuacuacuuugccuaaucuuccucuuaguccuacucgacuaccaaggcaugcuccccgucugcccccuuauacccggcuccaccaccaccaauaccggccccugcaaaaccugcacaacacccgcccaaggcaacucaauguucccguccugcuguugcaccaaaccaaccgacggaaauugcacaugcaucccaauccccucaucaugggcauucgccaaauaccucugggaaugggccuccguccguuucuccuggcucagccuacucguucccuucguccaaugguuugucggccuuucaccuacaguauggcuauccgccauauggaugaugugguacuggggacccucacucuacucaauugucucccccuucaucccauuacuccccaucuucuucugccucugggucuacauauaaggacuagucccuguucccagagcccacuuuuuuuucuuuuuuugaaauaaaauagccugucuuucagaucucaaaggcucuuuucagagccaccaaaaaaaaaaaaaaaaaaaaaaaaaaaaaaaaaaaaaaaaaaaaaaaaaaaaaaaaaaaaaaaaaaaaaaaaaaaaaaaaaaaaaaaaaaaaaaaaaaaaa

SEQ ID NO: 9969 - RNA, 2214 nt, Artificial Sequence
  mRNA Design a-3 (hSL-A100) comprising derived and/or modified sequence from Pf(3D7)__XP_001351122.1__HsALB_Pf-CSP(19-384)_L(PVTN)_HBsAg (opt11)
aggagagggcgcuuggcuugcaaggacccugagcugcggcauugaagcacacccaacccaacucgacugaagucagccucacugaaccggaucugagaaucuucucucucugggcuugccagggcucuccgaaccuagcuagcauccucuucaauuccaacuagaaagcuuaccaugaaaugggucaccuucauaucacuccuauuccuauuuucaagcgccuacucccucuuccaagaauaucaaugcuauggcucaagcucaaacacccgcguccucaacgagcuaaacuacgacaacgcaggaaccaaccucuacaacgaacuggaaaugaacuacuacggaaaacaagagaacugguacuccuuaaagaaaaacucccgcucccucggcgaaaacgaugacgguaacaacgaagacaaugaaaaacuccgaaaacccaaacacaagaaacuaaaacaaccagccgacggaaaccccgacccgaacgcaaaccccaacguagacccaaacgcaaacccuaauguagacccaaacgccaacccaaacgucgacccaaacgcaaacccaaacgcuaaccccaacgccaacccaaacgccaaccccaacgccaaccccaaugccaacccaaacgcgaaccccaacgcaaaccccaacgccaacccgaacgccaacccaaacgccaacccaaacgccaaccccaacgcgaacccaaacgccaacccaaacgcuaaccccaacgcaaaccccaacgccaacccuaacgucgacccaaacgccaaucccaacgccaaccccaacgcaaaccccaacgccaacccgaacgcgaaccccaacgcaaaccccaacgcaaacccaaacgccaaccccaacgccaacccaaacgccaacccgaacgccaacccaaacgcgaaucccaaugccaaccccaacgccaauccuaaugcaaacccaaacgcaaaccccaacgccaauccgaacgcaaacccgaacaaaaacaaccaagguaacggccaaggccacaacaugcccaacgaccccaaccgcaacgucgacgaaaacgcaaacgccaacuccgcaguuaaaaacaacaacaacgaagaaccaucagacaaacacauaaaagaauaccucaacaaaauccaaaacucgcucuccaccgaauggucccccuguagcguaaccugcgguaauggaauacaaguccgaaucaaaccaggcucugccaacaaacccaaagacgaacuagacuacgccaacgacauugaaaagaaaaucugcaaaauggaaaaauguagcuccgucuucaacguagucaacuccucccccguuaccaacauggagaacauaaccuccggcuuccucggcccccuucucgugcuacaggccggauucuuccuccuaaccaggauccuaaccaucccccagucacucgacuccugguggaccucacucaacuuccucggcggaucccccgucugccucggacaaaacucccaaucccccaccucaaaccacuccccaaccucuugcccgcccauaugccccgguuaccgcuggaugugccuucgccgcuucaucauauuucuauucauccuccuucucugccuaauauuccuacucguacuccucgacuaccaaggcaugcuacccgucugcccucuuauacccggauccacgacaaccaacaccggccccugcaaaaccugcaccacacccgcccaaggcaacucuauguuccccucaugcugcugcacaaaacccaccgacggcaacugcacaugcauaccaauccccucuuccugggccuuugccaaauaccuuugggaaugggcuuccguccguuuuuccugguuaucccuccuggucccauucguccaaugguucgucggccuuucaccaaccgucuggcuauccgccaucuggaugaugugguacuggggucccucccucuacagcaucgucucaccauuuaucccccuccugcccaucuucuucugcuuguggguauacauaugaggacuagucccuguucccagagcccacuuuuuuuucuuuuuuugaaauaaaauagccugucuuucagaucucaaaggcucuuuucagagccaccaaaaaaaaaaaaaaaaaaaaaaaaaaaaaaaaaaaaaaaaaaaaaaaaaaaaaaaaaaaaaaaaaaaaaaaaaaaaaaaaaaaaaaaaaaaaaaaaaaaaa

SEQ ID NO: 9970 - RNA, 2031 nt, Artificial Sequence
  mRNA Design a-3 (hSL-A100) comprising derived and/or modified sequence from Pf(3D7)__XP_001351122.1__HsALB_Pf-CSP(19-384)_L(SGG)_Ferritin (opt11)
aggagagggcgcuuggcuugcaaggacccugagcugcggcauugaagcacacccaacccaacucgacugaagucagccucacugaaccggaucugagaaucuucucucucugggcuugccagggcucuccgaaccuagcuagcauccucuucaauuccaacuagaaagcuuaccaugaaaugggucaccuucauaucacuacuuuuccuguucuccucagcauacucacucuuccaagaguaccaaugcuacggcucaucauccaauacccgcguacuuaacgaauuaaacuacgacaacgcaggcaccaaccucuacaacgaacucgaaaugaacuauuacggaaaacaagaaaacugguacucacuaaagaaaaacagcagaucccucggcgaaaacgacgacggcaauaacgaagacaacgaaaaacugagaaaaccuaaacacaagaaacucaaacaacccgcagacggcaaccccgaccccaacgccaacccaaacguagaccccaacgccaaccccaacgucgaccccaacgccaacccuaaugucgacccaaacgcaaacccuaacgcaaaccccaaugccaacccaaacgccaaccccaacgcaaaccccaacgcaaauccaaacgcaaaucccaacgcaaaccccaaugccaaccccaacgcaaacccaaacgccaaccccaacgcaaaccccaacgcuaacccaaacgccaacccaaacgcaaacccaaacgccaaccccaacgcuaaccccaacgucgaccccaacgccaaccccaacgcaaacccaaacgccaaccccaaugcaaacccaaacgccaaccccaacgcaaacccaaacgccaacccaaacgccaaccccaacgcaaaccccaacgcuaaccccaacgcaaaccccaaugcaaacccgaacgccaacccaaacgcaaacccaaacgccaacccaaacgccaaccccaacgccaacccaaacgccaacccaaacaaaaacaaccaagguaacggacaaggccacaacaugcccaacgauccuaaccgcaacguagacgaaaacgccaacgcaaacagcgcagucaaaaacaacaacaacgaggaaccaucagacaaacacaucaaagaauaccucaacaaaauccaaaacucccuauccacagaauggucacccugcuccguaaccugcggcaacggcauccaaguacgcaucaaacccggauccgcaaacaaaccaaaagaugaauuagauuaugcaaacgacauagaaaagaaaauaugcaaaauggaaaaaugcuccuccguauucaacguagucaacuccucuucagggggacucuccaaagacaucaucaaacuucucaacgaacaagucaacaaagagaugaacagcuccaaccucuacaugucaaugucaagcuggugcuacacacacucacuggacggcgccggccucuuccuauucgaccacgccgcagaagaauacgaacacgccaagaaacuuauaaucuuccuaaacgaaaauaacguaccuguccaacucacaucaaucucggccccagaacauaaauucgaagggcucacgcaaauauuucaaaaagcauacgaacacgaacagcacaucuccgaaucaaucaacaacauugucgaccacgcaaucaaauccaaagaccacgccacauucaacuuccuacaaugguacguggccgaacaacacgaagaagaaguccucuucaaagacauacuagacaaaaucgaacuaaucggcaacgaaaaccacggccucuaccuagccgaccaauacguaaaaggaaucgcgaaaucccgcaaauccuaaggacuagucccuguucccagagcccacuuuuuuuucuuuuuuugaaauaaaauagccugucuuucagaucucaaaggcucuuuucagagccaccaaaaaaaaaaaaaaaaaaaaaaaaaaaaaaaaaaaaaaaaaaaaaaaaaaaaaaaaaaaaaaaaaaaaaaaaaaaaaaaaaaaaaaaaaaaaaaaaaaaaa

SEQ ID NO: 9971 - RNA, 1992 nt, Artificial Sequence
  mRNA Design a-3 (hSL-A100) comprising derived and/or modified sequence from Pf(3D7)__XP_001351122.1__HsALB_Pf-CSP(93-384)_L(PVTN)_HBsAg (opt11)
aggagagggcgcuuggcuugcaaggacccugagcugcggcauugaagcacacccaacccaacucgacugaagucagccucacugaaccggaucugagaaucuucucucucugggcuugccagggcucuccgaaccuagcuagcauccucuucaauuccaacuagaaagcuuaccaugaaaugggucaccuuuaucucacuccuauuucucuucucuuccgcauacuccaaacucaaacaacccgcagacggaaaccccgacccaaacgcaaaccccaacguagaccccaacgccaaccccaacgucgaccccaacgccaaccccaacguagaccccaacgcaaaccccaacgccaacccaaacgccaaccccaacgccaaccccaacgccaaucccaacgccaacccaaacgcaaaucccaacgcaaaccccaacgccaaccccaacgccaacccaaacgccaauccaaacgcaaacccuaacgccaacccuaacgcgaaccccaacgccaaccccaacgcaaaccccaacgccaaccccaaugucgaccccaacgccaaccccaacgccaaccccaacgcaaaccccaacgcaaacccaaacgccaaucccaacgccaaccccaacgcaaacccuaacgccaaccccaaugccaauccuaacgccaaccccaacgccaacccuaacgccaacccaaacgccaaccccaacgccaaccccaacgccaacccuaacgccaacccuaacgccaacccaaacgccaauccaaacaagaacaaccaaggcaacggucaaggccacaauaugccaaacgacccaaaccgaaacguagacgaaaacgccaacgccaacuccgccgucaaaaacaacaacaacgaagaacccuccgacaaacacaucaaagaauaucugaacaaaauccaaaacucccucuccaccgaauggucccccugcuccgucacuuguggcaauggcauacaaguccgcaucaaacccggcucagccaacaaacccaaagacgaacucgacuacgcaaacgacaucgaaaagaaaauaugcaaaauggaaaaaugcuccucugucuucaacgucgucaacuccucgcccguaaccaacauggaaaacaucaccucaggauuccucggcccccuacucguccuccaagccggcuucuuccuccucacccgaauccuuacaaucccccaaucccuugacucaugguggaccucccuuaauuuccucggcgguucccccgucugccuuggccaaaacucacaaucccccaccucaaaccacucccccacuuccugcccgcccauaugccccggcuaccgcuggaugugccuccgccgguucaucauauuccucuucauccuacuccucugccuuauauuucuauuaguccuccuagacuaccaaggaaugcuccccguaugcccacuaauccccggauccaccaccaccaacaccggccccugcaaaaccugcaccaccccugcacaaggaaacuccauguucccaucuuguugcugcacaaaaccaaccgacggcaacuguaccugcauccccaucccuucaucaugggccuucgccaaauaccuaugggaaugggccucaguacguuucuccuggcuaucccuccucgucccauucguucaaugguucgucggccuaucccccacgguauggcucuccgcaauauggaugaugugguacuggggccccucacuauacaguauaguuucccccuucauaccccuccuccccauauucuucugccucuggguauacaucuagggacuagucccuguucccagagcccacuuuuuuuucuuuuuuugaaauaaaauagccugucuuucagaucucaaaggcucuuuucagagccaccaaaaaaaaaaaaaaaaaaaaaaaaaaaaaaaaaaaaaaaaaaaaaaaaaaaaaaaaaaaaaaaaaaaaaaaaaaaaaaaaaaaaaaaaaaaaaaaaaaaaa

SEQ ID NO: 9972 - RNA, 1653 nt, Artificial Sequence
  mRNA Design a-3 (hSL-A100) comprising derived and/or modified sequence from Pf(3D7)__XP_001351122.1__HsALB_Pf-CSP(199-377)_L(PVTN)_HBsAg (opt11)
aggagagggcgcuuggcuugcaaggacccugagcugcggcauugaagcacacccaacccaacucgacugaagucagccucacugaaccggaucugagaaucuucucucucugggcuugccagggcucuccgaaccuagcuagcauccucuucaauuccaacuagaaagcuuaccaugaaauggguaaccuucaucucccuccuauucuuauucucaucagccuacuccgacccaaacgcaaaccccaaugccaaccccaacgccaaccccaacgccaaucccaacgccaaccccaacgccaaucccaaugcuaaccccaacgccaacccaaacgccaacccaaacgcaaaccccaacgccaaccccaacgccaaccccaacgccaacccaaacgccaaccccaacgcaaaccccaacgccaacccaaacgccaaccccaacgccaacccaaacaaaaacaaucaaggcaacggccaaggacacaacaugcccaacgaccccaaccgcaacgucgacgaaaacgcaaacgccaacucugcagucaaaaacaacaacaacgaagaacccuccgacaaacacauaaaagaauaccucaacaaaauccaaaacucccucuccacagaaugguccccaugcuccgucacgugcggcaacggcauccaaguacgcaucaaacccggcucugccaacaaaccuaaagacgaacucgacuacgccaacgacaucgaaaagaaaaucugcaaaauggaaaaaugcuccucaguccccguaacuaacauggaaaacaucacguccggcuuccucggcccccuccuaguccuccaagccggcuucuuccuacucacacgcauucuuaccaucccgcaaucacucgacuccugguggaccucccucaacuucuuaggcggcuccccugucugccucggccaaaacucacaaucccccacuucaaaccacucacccaccagcugcccacccauaugcccaggauaccgcuggaugugccuccgccguuucauaaucuuccucuucauacuccuacucugccuaaucuuccuccucguacuccuagacuaccaaggcaugcuccccgucugcccacucauccccggaagcacuacaaccaacaccggccccugcaaaacaugcaccacccccgcacaaggcaacuccauguuccccuccugcugcugcacaaaacccacugauggcaacugcacuugcauccccauccccuccucaugggccuucgccaaauaucucugggaaugggccagcguccgguucucuuggcucucacuccuaguccccuucguucaaugguucguaggccuaucccccaccgucuggcucuccgcaauauggaugaugugguauuggggccccucccucuacuccauuguaucccccuucaucccacuacuccccaucuucuucugccuuugggucuacauauaaggacuagucccuguucccagagcccacuuuuuuuucuuuuuuugaaauaaaauagccugucuuucagaucucaaaggcucuuuucagagccaccaaaaaaaaaaaaaaaaaaaaaaaaaaaaaaaaaaaaaaaaaaaaaaaaaaaaaaaaaaaaaaaaaaaaaaaaaaaaaaaaaaaaaaaaaaaaaaaaaaaaa

SEQ ID NO: 9973 - RNA, 1350 nt, Artificial Sequence
  mRNA Design a-3 (hSL-A100) comprising derived and/or modified sequence from Pf(3D7)__XP_001351122.1__HsALB_Pf-CSP(19-272)_L(AAY)_Pf-CSP(346-3 75)_L(AAY)_Pf-CSP(310-327) (opt11)
aggagagggcgcuuggcuugcaaggacccugagcugcggcauugaagcacacccaacccaacucgacugaagucagccucacugaaccggaucugagaaucuucucucucugggcuugccagggcucuccgaaccuagcuagcauccucuucaauuccaacuagaaagcuuaccaugaaauggguaaccuucaucucacuccuauuccuguucuccagugcauacucacucuuccaagaauaccaaugcuacggcuccagcagcaacacgcgaguccucaacgaacuaaacuacgauaacgccggaaccaaccuuuacaacgaacucgaaaugaacuacuacggcaaacaagaaaacugguacucacuaaaaaaaaacagcagaucacuaggcgaaaacgacgacggaaacaacgaagacaacgaaaaacuacgcaagcccaaacacaagaaacucaaacaacccgcagacggaaacccagaccccaacgcaaaccccaacguagaccccaacgcaaaccccaacguagaccccaacgcaaaucccaacguagacccaaacgcaaaccccaacgcaaacccaaacgcaaacccaaacgcgaacccaaacgcaaacccaaacgcaaacccgaacgccaacccaaacgcaaacccaaacgcuaaccccaacgcaaacccaaacgcaaacccaaacgcaaacccaaacgcaaacccaaacgcaaacccaaacgcaaacccgaacgcaaacccaaacgcaaaccccaacguagacccaaacgccaacccaaacgcaaaccccaacgccaacccaaacgcaaacccaaacgcaaacccaaacgcaaacccaaacgcaaacccaaacgcaaacccaaacgcaaaccccaacgcgaacccaaacgccaacccaaacgcaaacccaaacgcgaacccaaacgccaaccccaacgcaaaccccaacgcaaaccccaacgcaaacccaaacgcaaaccccgccgcuuacauaaaacccggcucggccaauaaaccaaaagacgaacucgacuacgccaacgacauagaaaaaaaaauaugcaaaauggaaaaaugcagcgccgccuacgaaccaucagacaaacacaucaaagaauaccucaacaaaauacaaaacagccucuaaggacuagucccuguucccagagcccacuuuuuuuucuuuuuuugaaauaaaauagccugucuuucagaucucaaaggcucuuuucagagccaccaaaaaaaaaaaaaaaaaaaaaaaaaaaaaaaaaaaaaaaaaaaaaaaaaaaaaaaaaaaaaaaaaaaaaaaaaaaaaaaaaaaaaaaaaaaaaaaaaaaaa

SEQ ID NO: 9974 - RNA, 1398 nt, Artificial Sequence
  mRNA Design a-3 (hSL-A100) comprising derived and/or modified sequence from Pf(3D7)__XP_001351122.1__HsALB_Pf-CSP(19-272)_L(AAY)_Pf-CSP(346-3 75)_L(AAY)_Pf-CSP(310-327)_L(AAY)_PADRE (opt11)
aggagagggcgcuuggcuugcaaggacccugagcugcggcauugaagcacacccaacccaacucgacugaagucagccucacugaaccggaucugagaaucuucucucucugggcuugccagggcucuccgaaccuagcuagcauccucuucaauuccaacuagaaagcuuaccaugaaauggguaacauuuaucucccuccucuuccucuuuuccuccgcauacucacucuuccaagaauaccaaugcuacggaucaagcuccaacacccgcguccuuaacgaacuuaacuacgacaacgccggcaccaacuuauacaacgaacucgagaugaacuacuacggcaaacaagaaaacugguacucccucaaaaaaaacuccagaucccucggcgaaaacgacgacggaaacaacgaagacaacgaaaaacuccgcaaacccaaacacaaaaaacucaaacaacccgcugacggcaacccugaccccaacgccaaccccaacguagaccccaacgccaaucccaacguagacccaaacgccaaccccaacguagaccccaacgccaaccccaacgcaaacccaaacgccaaccccaacgccaaccccaacgcgaacccaaacgccaaccccaacgccaacccuaacgccaacccgaacgccaaccccaacgccaaccccaacgccaaccccaacgcgaaccccaacgcaaaccccaacgccaaccccaacgcaaaccccaacgccaaccccaacgccaaccccaacguagaccccaacgccaacccaaacgccaacccaaacgcaaaccccaacgccaauccaaacgcaaaccccaacgcaaaccccaaugccaacccaaacgccaaccccaacgccaacccaaacgccaacccaaacgccaaccccaacgcaaacccaaacgcaaaccccaacgcaaacccuaacgccaacccaaacgccaacccaaacgcaaaccccaacgcaaaccccgccgccuacaucaaaccaggcuccgccaauaaaccaaaagacgaacucgacuacgcaaaugacauagaaaaaaaaauaugcaaaauggaaaaaugcuccgcagccuacgaacccagcgacaaacauaucaaagaauacuuaaacaaaauccaaaacucccuagccgccuacgccaaauucgucgcagccuggacccucaaagccgccgccuaaggacuagucccuguucccagagcccacuuuuuuuucuuuuuuugaaauaaaauagccugucuuucagaucucaaaggcucuuuucagagccaccaaaaaaaaaaaaaaaaaaaaaaaaaaaaaaaaaaaaaaaaaaaaaaaaaaaaaaaaaaaaaaaaaaaaaaaaaaaaaaaaaaaaaaaaaaaaaaaaaaaaa

SEQ ID NO: 9975 - RNA, 1398 nt, Artificial Sequence
  mRNA Design a-3 (hSL-A100) comprising derived and/or modified sequence from Pf(3D7)__XP_001351122.1__HsALB_Pf-CSP(19-272)_L(AAY)_Pf-CSP(310-3 27)_L(AAY)_Pf-CSP(346-375)_L(AAY)_PADRE (opt11)
aggagagggcgcuuggcuugcaaggacccugagcugcggcauugaagcacacccaacccaacucgacugaagucagccucacugaaccggaucugagaaucuucucucucugggcuugccagggcucuccgaaccuagcuagcauccucuucaauuccaacuagaaagcuuaccaugaaaugggugaccuuuaucucacuccucuuccucuucucaagcgcauacucacucuuccaagaauaccaaugcuacgguucaagcucaaacacaagaguccucaacgaacucaacuacgacaacgccggaaccaaccucuacaacgaacucgaaaugaacuacuacggcaaacaagaaaacugguacucacucaaaaaaaacagcaggucccuaggcgaaaacgacgacggaaacaacgaagacaacgaaaaacuccgcaaaccaaaacacaaaaaacugaaacaacccgcagacggaaacccagaccccaacgcaaacccgaacgucgacccgaacgccaacccaaacguagacccaaacgcaaaccccaacgucgacccaaacgcaaacccaaacgcaaacccaaacgcaaacccgaacgcaaacccaaacgcgaacccaaacgcaaacccaaacgcaaacccaaacgccaacccaaacgcaaacccaaaugcaaaccccaacgcaaacccgaacgcaaacccaaacgcaaaccccaacgcaaacccaaacgcuaacccaaacgcgaaccccaacgcaaacccaaacguggacccaaacgcaaacccaaacgcaaacccaaacgcgaacccgaacgcaaacccaaacgcgaacccaaacgcaaaccccaacgcaaacccaaacgcaaacccaaacgccaacccaaacgcaaacccaaacgcgaaccccaacgccaacccaaacgcaaacccaaacgcaaacccaaacgcaaacccaaacgcaaacccaaacgccaacccaaacgcaaacccagcugccuacgaacccuccgacaaacacaucaaagaguaccugaacaaaauccaaaacucccucgcagccuacaucaagcccggauccgcaaacaaacccaaagacgaacucgacuacgccaacgacauagaaaaaaaaaucugcaaaauggaaaaaugcucagccgcauacgcaaaauucguagcagccuggacccuaaaagcggcagcauaaggacuagucccuguucccagagcccacuuuuuuuucuuuuuuugaaauaaaauagccugucuuucagaucucaaaggcucuuuucagagccaccaaaaaaaaaaaaaaaaaaaaaaaaaaaaaaaaaaaaaaaaaaaaaaaaaaaaaaaaaaaaaaaaaaaaaaaaaaaaaaaaaaaaaaaaaaaaaaaaaaaaa

SEQ ID NO: 9976 - RNA, 1452 nt, Artificial Sequence
  mRNA Design a-3 (hSL-A100) comprising derived and/or modified sequence from Pf(3D7)__XP_001351122.1__HsALB_Pf-CSP(19-272)_L(AAY)_Pf-CSP(310-3 27)_L(AAY)_Pf-CSP(346-375)_L(AAY)_PADRE_L(AAY)_P2 (opt11)
aggagagggcgcuuggcuugcaaggacccugagcugcggcauugaagcacacccaacccaacucgacugaagucagccucacugaaccggaucugagaaucuucucucucugggcuugccagggcucuccgaaccuagcuagcauccucuucaauuccaacuagaaagcuuaccaugaaaugggugaccuucauaucacuauuauuccucuucucaagcgcauacucacucuuccaagaauaccaaugcuacggcuccuccucaaacacgcgcguacucaacgaacuaaacuacgacaacgccggaacaaaccucuacaacgaacuagaaaugaacuacuacggcaaacaagaaaacugguacucccuaaaaaaaaacucaagaucccuaggcgagaaugacgacggcaacaacgaagacaacgaaaaacuccgcaaacccaaacacaaaaaacucaaacaacccgccgacggaaacccagacccaaacgccaacccaaacgucgacccaaacgcaaaccccaacguagaccccaacgcaaacccaaacguagacccaaacgcaaacccaaacgcaaacccaaacgcaaaccccaacgccaacccaaacgcaaacccaaacgccaauccaaacgcaaacccaaaugccaacccaaacgcaaacccaaacgcaaacccaaacgccaaccccaacgcaaacccaaacgcaaacccaaacgccaacccaaacgcaaacccaaacgcaaaccccaacgccaacccgaacguagaccccaacgcaaaccccaacgcaaacccaaacgccaauccaaacgcaaaccccaacgcaaaccccaacgcaaaccccaacgccaauccaaacgccaaccccaacgcgaacccgaacgcaaacccaaacgcaaacccaaacgcaaacccaaacgcaaacccaaacgcaaacccaaacgcaaacccgaacgcaaaccccaacgccaacccaaacgcaaacccagccgcauacgaacccucagacaaacacauaaaagaauaccuaaacaaaauccaaaacucacucgcugccuacaucaaaccaggaagcgcaaacaaacccaaagacgaacucgauuacgccaacgacaucgaaaaaaaaaucugcaaaauggaaaaaugcuccgccgccuacgcaaaauucgucgcagccuggacucuaaaagccgccgcagccgcauaccaauacauaaaagccaacucaaaauucaucggaaucaccgaacuguaaggacuagucccuguucccagagcccacuuuuuuuucuuuuuuugaaauaaaauagccugucuuucagaucucaaaggcucuuuucagagccaccaaaaaaaaaaaaaaaaaaaaaaaaaaaaaaaaaaaaaaaaaaaaaaaaaaaaaaaaaaaaaaaaaaaaaaaaaaaaaaaaaaaaaaaaaaaaaaaaaaaaa

SEQ ID NO: 9977 - RNA, 1416 nt, Artificial Sequence
  mRNA Design a-3 (hSL-A100) comprising derived and/or modified sequence from Pf(3D7)__XP_001351122.1__HsALB_Pf-CSP(19-272)_L(AAY)_Pf-CSP(310-3 27)_Linker (AAY)_Pf-CSP(346-397) (opt11)
aggagagggcgcuuggcuugcaaggacccugagcugcggcauugaagcacacccaacccaacucgacugaagucagccucacugaaccggaucugagaaucuucucucucugggcuugccagggcucuccgaaccuagcuagcauccucuucaauuccaacuagaaagcuuaccaugaaaugggucaccuucaucucacuccuguuccuauucucgagcgcauacucccucuuccaagaauaccagugcuacggcucaagcucaaacacacgcguacucaacgaacuaaacuacgacaacgccggaaccaaccucuacaacgaacuagaaaugaacuacuacggcaaacaagagaacugguacucucuaaagaaaaacagcagaucccugggcgagaacgacgacggaaacaacgaagacaacgagaaacuacgcaaacccaaacacaagaaacuaaaacaacccgcagauggaaacccagauccaaacgcaaacccaaacgucgacccuaacgcaaaccccaacguagaccccaacgcaaaccccaacguagacccaaacgccaacccaaacgccaacccaaacgccaacccgaacgcaaaccccaaugccaacccaaacgccaacccgaacgccaacccaaacgcgaaccccaacgccaacccaaacgcaaacccaaacgcaaacccuaacgcaaaccccaacgccaacccaaaugccaacccaaacgcaaacccaaacgcaaacccaaacgccaaccccaacguagacccaaacgcaaaccccaacgcaaacccaaacgcaaacccaaacgccaacccaaacgcaaacccaaacgcaaacccaaacgcaaacccgaacgccaaccccaacgcaaacccaaacgcaaacccaaacgccaacccaaacgccaacccaaacgcaaaccccaacgcaaaccccaacgccaaccccaacgccaacccaaacgcaaacccaaacgcaaacccagccgcauacgaacccucagacaaacacauaaaagaauaccucaauaaaauccaaaacucacuugcagccuacauaaaaccaggcagcgcgaacaaacccaaagacgaacucgacuacgcgaacgacauagaaaagaaaaucugcaaaauggaaaaaugcucauccgucuucaaugucguaaacucauccauaggccuaaucaugguccucuccuuccuauuccucaacuaaggacuagucccuguucccagagcccacuuuuuuuucuuuuuuugaaauaaaauagccugucuuucagaucucaaaggcucuuuucagagccaccaaaaaaaaaaaaaaaaaaaaaaaaaaaaaaaaaaaaaaaaaaaaaaaaaaaaaaaaaaaaaaaaaaaaaaaaaaaaaaaaaaaaaaaaaaaaaaaaaaaaa

SEQ ID NO: 9978 - RNA, 1860 nt, Artificial Sequence
  mRNA Design i-3 (hSL-A100) comprising derived and/or modified sequence from Pf(3D7)__XP_001351122.1__LumSynt_L(GGS4-GGG)_Pf-CSP(19-397) (opt1)
aggagaaagcuuaccaugcagaucuacgagggcaagcugaccgccgaggggcuccgcuucggcaucguggccagccgguucaaccacgcgcuggucgaccgccugguggagggggccaucgacgccaucgugcggcacggcgggcgcgaggaggacaucacccucguccgggugcccggcuccugggagaucccgguggccgccggcgagcuggcccgcaaggaggacaucgacgcggucaucgccaucggggugcugauccggggcgccacgccccacuucgacuacaucgccagcgagguguccaaggggcucgcggaccugagccuggagcuccgcaagcccaucaccuucggcgucaucaccgccgacacccuggagcaggccaucgagcgggccgggacgaagcacggcaacaagggcugggaggccgcgcuguccgccaucgagauggccaaccucuucaagagccugcgcggcgggagcggcggguccggcgggagcggcggcuccgggggcgggcuguuccaggaguaccagugcuacggcuccagcuccaacacccgggugcucaacgagcugaacuacgacaacgcggggaccaaccuguacaacgagcucgagaugaacuacuacggcaagcaggagaacugguacagccugaagaagaacucccgcagccugggggagaacgacgacggcaacaacgaggacaacgagaagcuccggaagcccaagcacaagaagcugaagcagccggccgacgggaaccccgaccccaacgccaaccccaacguggacccgaacgccaaccccaacgucgaccccaacgccaaccccaacguggacccgaacgcgaaccccaacgccaaccccaacgccaaccccaacgccaacccgaacgcgaaccccaacgccaaccccaacgccaaccccaacgccaacccgaacgccaaccccaacgcgaaccccaacgccaaccccaacgccaacccgaacgccaaccccaacgccaaccccaacgcgaaccccaacgccaacccgaacgccaaccccaacguggaccccaacgccaaccccaacgccaacccgaacgcgaaccccaacgccaaccccaacgccaacccgaacgccaaccccaacgccaaccccaacgcgaaccccaacgccaacccgaacgccaaccccaacgccaaccccaacgcgaaccccaacgccaacccgaacgccaaccccaacgccaaccccaacgccaaccccaacgcgaacccgaacgccaaccccaacaagaacaaccagggcaacggccaggggcacaacaugcccaacgaccccaaccgcaacgucgacgagaacgccaacgccaacuccgccgugaagaacaacaacaacgaggagccgagcgacaagcacaucaaggaguaccugaacaagauccagaacucccucagcacggaguggucccccugcagcgugaccugcggcaacgggauccagguccggaucaagcccggcuccgcgaacaagcccaaggacgagcuggacuacgccaacgacaucgagaagaagaucugcaagauggagaagugcagcuccguguucaacguggucaacagcuccaucgggcugaucauggugcucagcuuccuguuccugaacugaggacuaguuauaagacugacuagcccgaugggccucccaacgggcccuccuccccuccuugcaccgagauuaaucaaaggcucuuuucagagccaccaaaaaaaaaaaaaaaaaaaaaaaaaaaaaaaaaaaaaaaaaaaaaaaaaaaaaaaaaaaaaaaaaaaaaaaaaaaaaaaaaaaaaaaaaaaaaaaaaaaaa

SEQ ID NO: 9979 - RNA, 1407 nt, Artificial Sequence; identical to SEQ ID NO: 8505
  mRNA Design i-3 (hSL-A100) comprising derived and/or modified sequence from Pf(3D7)__XP_001351122.1__HsALB_Pf-CSP(19-397) (opt1)

SEQ ID NO: 9980 - RNA, 1722 nt, Artificial Sequence
  mRNA Design i-3 (hSL-A100) comprising derived and/or modified sequence from Pf(3D7)__XP_001351122.1__HsALB_Pf-CSP(19-272)_L(PVTN)_HBsAg (opt1)
aggagaaagcuuaccaugaagugggugaccuucaucagccugcucuuccuguucuccagcgccuacucccuguuccaggaguaccagugcuacggcuccagcuccaacacccgggugcucaacgagcugaacuacgacaacgcggggaccaaccuguacaacgagcucgagaugaacuacuacggcaagcaggagaacugguacagccugaagaagaacucccgcagccugggggagaacgacgacggcaacaacgaggacaacgagaagcuccggaagcccaagcacaagaagcugaagcagccggccgacgggaaccccgaccccaacgccaaccccaacguggacccgaacgccaaccccaacgucgaccccaacgccaaccccaacguggacccgaacgcgaaccccaacgccaaccccaacgccaaccccaacgccaacccgaacgcgaaccccaacgccaaccccaacgccaaccccaacgccaacccgaacgccaaccccaacgcgaaccccaacgccaaccccaacgccaacccgaacgccaaccccaacgccaaccccaacgcgaaccccaacgccaacccgaacgccaaccccaacguggaccccaacgccaaccccaacgccaacccgaacgcgaaccccaacgccaaccccaacgccaacccgaacgccaaccccaacgccaaccccaacgcgaaccccaacgccaacccgaacgccaaccccaacgccaaccccaacgcgaaccccaacgccaacccgaacgccaaccccaacgccaaccccaacgccaaccccaacgcgaacccgaacgccaaccccccggugacgaacauggagaacaucaccagcggcuuccuggggccccuccuggugcugcaggccggcuucuuccuccugacccgcauccugaccaucccgcagucccucgacagcugguggaccucccugaacuuccucgggggcagccccgucugccuggggcagaacucccagagccccaccuccaaccacagccccaccuccugcccgcccaucugccccggcuaccgguggaugugccugcgccgguucaucaucuuccuguucauccuccugcugugccucaucuuccugcuggugcuccuggacuaccagggcaugcugcccgugugcccgcucauccccgggagcacgaccaccaacaccggccccugcaagacgugcaccacccccgcccaggggaacuccauguucccgagcugcugcugcaccaagcccacggacggcaacugcacgugcauccccauccccuccagcugggcguucgccaaguaccugugggagugggccuccguccgcuucagcuggcugucccuccuggugccguucgugcagugguucgucgggcugagccccaccguguggcucuccgccaucuggaugaugugguacuggggccccagccuguacagcaucgugucccccuucaucccgcugcuccccaucuucuucugccugugggucuacaucugaggacuaguuauaagacugacuagcccgaugggccucccaacgggcccuccuccccuccuugcaccgagauuaaucaaaggcucuuuucagagccaccaaaaaaaaaaaaaaaaaaaaaaaaaaaaaaaaaaaaaaaaaaaaaaaaaaaaaaaaaaaaaaaaaaaaaaaaaaaaaaaaaaaaaaaaaaaaaaaaaaaaa

SEQ ID NO: 9981 - RNA, 1839 nt, Artificial Sequence
  mRNA Design i-3 (hSL-A100) comprising derived and/or modified sequence from Pf(3D7)__XP_001351122.1__HsALB_Pf-CSP(19-272)_L(AAY)_Pf-CSP(346-3 65)_L(AAY)_PADRE_L(PVTN)_HBsAg (opt1)
aggagaaagcuuaccaugaagugggugaccuucaucagccugcucuuccuguucuccagcgccuacucccuguuccaggaguaccagugcuacggcuccagcuccaacacccgggugcucaacgagcugaacuacgacaacgcggggaccaaccuguacaacgagcucgagaugaacuacuacggcaagcaggagaacugguacagccugaagaagaacucccgcagccugggggagaacgacgacggcaacaacgaggacaacgagaagcuccggaagcccaagcacaagaagcugaagcagccggccgacgggaaccccgaccccaacgccaaccccaacguggacccgaacgccaaccccaacgucgaccccaacgccaaccccaacguggacccgaacgcgaaccccaacgccaaccccaacgccaaccccaacgccaacccgaacgcgaaccccaacgccaaccccaacgccaaccccaacgccaacccgaacgccaaccccaacgcgaaccccaacgccaaccccaacgccaacccgaacgccaaccccaacgccaaccccaacgcgaaccccaacgccaacccgaacgccaaccccaacguggaccccaacgccaaccccaacgccaacccgaacgcgaaccccaacgccaaccccaacgccaacccgaacgccaaccccaacgccaaccccaacgcgaaccccaacgccaacccgaacgccaaccccaacgccaaccccaacgcgaaccccaacgccaacccgaacgccaaccccaacgccaaccccaacgccaaccccaacgcgaacccgaacgccaaccccgccgcguauaucaagcccggcuccgcgaacaagcccaaggacgagcuggacuacgccaacgacaucgaggcggccuacgccaaguucguggccgccuggacccugaaggcggccgccccggugacgaacauggagaacaucaccagcggcuuccuggggccccuccuggugcugcaggccggcuucuuccuccugacccgcauccugaccaucccgcagucccucgacagcugguggaccucccugaacuuccucgggggcagccccgucugccuggggcagaacucccagagccccaccuccaaccacagccccaccuccugcccgcccaucugccccggcuaccgguggaugugccugcgccgguucaucaucuuccuguucauccuccugcugugccucaucuuccugcuggugcuccuggacuaccagggcaugcugcccgugugcccgcucauccccgggagcacgaccaccaacaccggccccugcaagacgugcaccacccccgcccaggggaacuccauguucccgagcugcugcugcaccaagcccacggacggcaacugcacgugcauccccauccccuccagcugggcguucgccaaguaccugugggagugggccuccguccgcuucagcuggcugucccuccuggugccguucgugcagugguucgucgggcugagccccaccguguggcucuccgccaucuggaugaugugguacuggggccccagccuguacagcaucgugucccccuucaucccgcugcuccccaucuucuucugccugugggucuacaucugaggacuaguuauaagacugacuagcccgaugggccucccaacgggcccuccuccccuccuugcaccgagauuaaucaaaggcucuuuucagagccaccaaaaaaaaaaaaaaaaaaaaaaaaaaaaaaaaaaaaaaaaaaaaaaaaaaaaaaaaaaaaaaaaaaaaaaaaaaaaaaaaaaaaaaaaaaaaaaaaaaaaa

SEQ ID NO: 9982 - RNA, 1839 nt, Artificial Sequence
  mRNA Design i-3 (hSL-A100) comprising derived and/or modified sequence from Pf(3D7)__XP_001351122.1__HsALB_Pf-CSP(19-272)_L(AAY)_Pf-CSP(346-3 65)_L(AAY)_PADRE_L(PVTN)_HBsAg (opt1)
aggagaaagcuuaccaugaagugggugaccuucaucagccuccuguuccuguucuccagcgccuacucccuguuccaggaguaccagugcuacggcuccagcuccaacacccgggugcucaacgagcugaacuacgacaacgcggggaccaaccuguacaacgagcucgagaugaacuacuacggcaagcaggagaacugguacagccugaagaagaacucccgcagccugggggagaacgacgacggcaacaacgaggacaacgagaagcuccggaagcccaagcacaagaagcugaagcagccggccgacgggaaccccgaccccaacgccaaccccaacguggacccgaacgccaaccccaacgucgaccccaacgccaaccccaacguggacccgaacgcgaaccccaacgccaaccccaacgccaaccccaacgccaacccgaacgcgaaccccaacgccaaccccaacgccaaccccaacgccaacccgaacgccaaccccaacgcgaaccccaacgccaaccccaacgccaacccgaacgccaaccccaacgccaaccccaacgcgaaccccaacgccaacccgaacgccaaccccaacguggaccccaacgccaaccccaacgccaacccgaacgcgaaccccaacgccaaccccaacgccaacccgaacgccaaccccaacgccaaccccaacgcgaaccccaacgccaacccgaacgccaaccccaacgccaaccccaacgcgaaccccaacgccaacccgaacgccaaccccaacgccaaccccaacgccaaccccaacgcgaacccgaacgccaaccccgccgcguauaucaagcccggcuccgcgaacaagcccaaggacgagcuggacuacgccaacgacaucgaggcggccuacgccaaguucguggccgccuggacccugaaggcggccgccccggugacgaacauggagaacaucaccagcggcuuccuggggccccuccuggugcugcaggccggcuucuuccuccugacccgcauccugaccaucccgcagucccucgacagcugguggaccucccugaacuuccucgggggcagccccgucugccuggggcagaacucccagagccccaccuccaaccacagccccaccuccugcccgcccaucugccccggcuaccgguggaugugccugcgccgguucaucaucuuccuguucauccuccugcugugccucaucuuccugcuggugcuccuggacuaccagggcaugcugcccgugugcccgcucauccccgggagcacgaccaccaacaccggccccugcaagacgugcaccacccccgcccaggggaacuccauguucccgagcugcugcugcaccaagcccacggacggcaacugcacgugcauccccauccccuccagcugggcguucgccaaguaccugugggagugggccuccguccgcuucagcuggcugucccuccuggugccguucgugcagugguucgucgggcugagccccaccguguggcucuccgccaucuggaugaugugguacuggggccccagccuguacagcaucgugucccccuucaucccgcugcuccccaucuucuucugccugugggucuacaucugaggacuaguuauaagacugacuagcccgaugggccucccaacgggcccuccuccccuccuugcaccgagauuaaucaaaggcucuuuucagagccaccaaaaaaaaaaaaaaaaaaaaaaaaaaaaaaaaaaaaaaaaaaaaaaaaaaaaaaaaaaaaaaaaaaaaaaaaaaaaaaaaaaaaaaaaaaaaaaaaaaaaa

SEQ ID NO: 9983 - RNA, 2058 nt, Artificial Sequence
  mRNA Design i-3 (hSL-A100) comprising derived and/or modified sequence from Pf(3D7)__XP_001351122.1__HsALB_Pf-CSP(19-384)_L(PVTN)_HBsAg (opt1)
aggagaaagcuuaccaugaagugggugaccuucaucagccugcucuuccuguucuccagcgccuacucccuguuccaggaguaccagugcuacggcuccagcuccaacacccgggugcucaacgagcugaacuacgacaacgcggggaccaaccuguacaacgagcucgagaugaacuacuacggcaagcaggagaacugguacagccugaagaagaacucccgcagccugggggagaacgacgacggcaacaacgaggacaacgagaagcuccggaagcccaagcacaagaagcugaagcagccggccgacgggaaccccgaccccaacgccaaccccaacguggacccgaacgccaaccccaacgucgaccccaacgccaaccccaacguggacccgaacgcgaaccccaacgccaaccccaacgccaaccccaacgccaacccgaacgcgaaccccaacgccaaccccaacgccaaccccaacgccaacccgaacgccaaccccaacgcgaaccccaacgccaaccccaacgccaacccgaacgccaaccccaacgccaaccccaacgcgaaccccaacgccaacccgaacgccaaccccaacguggaccccaacgccaaccccaacgccaacccgaacgcgaaccccaacgccaaccccaacgccaacccgaacgccaaccccaacgccaaccccaacgcgaaccccaacgccaacccgaacgccaaccccaacgccaaccccaacgcgaaccccaacgccaacccgaacgccaaccccaacgccaaccccaacgccaaccccaacgcgaacccgaacgccaaccccaacaagaacaaccagggcaacggccaggggcacaacaugcccaacgaccccaaccgcaacgucgacgagaacgccaacgccaacuccgccgugaagaacaacaacaacgaggagccgagcgacaagcacaucaaggaguaccugaacaagauccagaacucccucagcacggaguggucccccugcagcgugaccugcggcaacgggauccagguccggaucaagcccggcuccgcgaacaagcccaaggacgagcuggacuacgccaacgacaucgagaagaagaucugcaagauggagaagugcagcuccguguucaacguggucaacagcuccccggugacgaacauggagaacaucaccagcggcuuccuggggccccuccuggugcugcaggccggcuucuuccuccugacccgcauccugaccaucccgcagucccucgacagcugguggaccucccugaacuuccucgggggcagccccgucugccuggggcagaacucccagagccccaccuccaaccacagccccaccuccugcccgcccaucugccccggcuaccgguggaugugccugcgccgguucaucaucuuccuguucauccuccugcugugccucaucuuccugcuggugcuccuggacuaccagggcaugcugcccgugugcccgcucauccccgggagcacgaccaccaacaccggccccugcaagacgugcaccacccccgcccaggggaacuccauguucccgagcugcugcugcaccaagcccacggacggcaacugcacgugcauccccauccccuccagcugggcguucgccaaguaccugugggagugggccuccguccgcuucagcuggcugucccuccuggugccguucgugcagugguucgucgggcugagccccaccguguggcucuccgccaucuggaugaugugguacuggggccccagccuguacagcaucgugucccccuucaucccgcugcuccccaucuucuucugccugugggucuacaucugaggacuaguuauaagacugacuagcccgaugggccucccaacgggcccuccuccccuccuugcaccgagauuaaucaaaggcucuuuucagagccaccaaaaaaaaaaaaaaaaaaaaaaaaaaaaaaaaaaaaaaaaaaaaaaaaaaaaaaaaaaaaaaaaaaaaaaaaaaaaaaaaaaaaaaaaaaaaaaaaaaaaa

SEQ ID NO: 9984 - RNA, 2058 nt, Artificial Sequence
  mRNA Design i-3 (hSL-A100) comprising derived and/or modified sequence from Pf(3D7)__XP_001351122.1__HsALB_Pf-CSP(19-384)_L(PVTN)_HBsAg (opt1)
aggagaaagcuuaccaugaagugggugaccuucaucagccuccuguuccuguucuccagcgccuacucccuguuccaggaguaccagugcuacggcuccagcuccaacacccgggugcucaacgagcugaacuacgacaacgcggggaccaaccuguacaacgagcucgagaugaacuacuacggcaagcaggagaacugguacagccugaagaagaacucccgcagccugggggagaacgacgacggcaacaacgaggacaacgagaagcuccggaagcccaagcacaagaagcugaagcagccggccgacgggaaccccgaccccaacgccaaccccaacguggacccgaacgccaaccccaacgucgaccccaacgccaaccccaacguggacccgaacgcgaaccccaacgccaaccccaacgccaaccccaacgccaacccgaacgcgaaccccaacgccaaccccaacgccaaccccaacgccaacccgaacgccaaccccaacgcgaaccccaacgccaaccccaacgccaacccgaacgccaaccccaacgccaaccccaacgcgaaccccaacgccaacccgaacgccaaccccaacguggaccccaacgccaaccccaacgccaacccgaacgcgaaccccaacgccaaccccaacgccaacccgaacgccaaccccaacgccaaccccaacgcgaaccccaacgccaacccgaacgccaaccccaacgccaaccccaacgcgaaccccaacgccaacccgaacgccaaccccaacgccaaccccaacgccaaccccaacgcgaacccgaacgccaaccccaacaagaacaaccagggcaacggccaggggcacaacaugcccaacgaccccaaccgcaacgucgacgagaacgccaacgccaacuccgccgugaagaacaacaacaacgaggagccgagcgacaagcacaucaaggaguaccugaacaagauccagaacucccucagcacggaguggucccccugcagcgugaccugcggcaacgggauccagguccggaucaagcccggcuccgcgaacaagcccaaggacgagcuggacuacgccaacgacaucgagaagaagaucugcaagauggagaagugcagcuccguguucaacguggucaacagcuccccggugacgaacauggagaacaucaccagcggcuuccuggggccccuccuggugcugcaggccggcuucuuccuccugacccgcauccugaccaucccgcagucccucgacagcugguggaccucccugaacuuccucgggggcagccccgucugccuggggcagaacucccagagccccaccuccaaccacagccccaccuccugcccgcccaucugccccggcuaccgguggaugugccugcgccgguucaucaucuuccuguucauccuccugcugugccucaucuuccugcuggugcuccuggacuaccagggcaugcugcccgugugcccgcucauccccgggagcacgaccaccaacaccggccccugcaagacgugcaccacccccgcccaggggaacuccauguucccgagcugcugcugcaccaagcccacggacggcaacugcacgugcauccccauccccuccagcugggcguucgccaaguaccugugggagugggccuccguccgcuucagcuggcugucccuccuggugccguucgugcagugguucgucgggcugagccccaccguguggcucuccgccaucuggaugaugugguacuggggccccagccuguacagcaucgugucccccuucaucccgcugcuccccaucuucuucugccugugggucuacaucugaggacuaguuauaagacugacuagcccgaugggccucccaacgggcccuccuccccuccuugcaccgagauuaaucaaaggcucuuuucagagccaccaaaaaaaaaaaaaaaaaaaaaaaaaaaaaaaaaaaaaaaaaaaaaaaaaaaaaaaaaaaaaaaaaaaaaaaaaaaaaaaaaaaaaaaaaaaaaaaaaaaaa

SEQ ID NO: 9985 - RNA, 1875 nt, Artificial Sequence
  mRNA Design i-3 (hSL-A100) comprising derived and/or modified sequence from Pf(3D7)__XP_001351122.1__HsALB_Pf-CSP(19-384)_L(SGG)_Ferritin (opt1)
aggagaaagcuuaccaugaagugggugaccuucaucagccugcucuuccuguucuccagcgccuacucccuguuccaggaguaccagugcuacggcuccagcuccaacacccgggugcucaacgagcugaacuacgacaacgcggggaccaaccuguacaacgagcucgagaugaacuacuacggcaagcaggagaacugguacagccugaagaagaacucccgcagccugggggagaacgacgacggcaacaacgaggacaacgagaagcuccggaagcccaagcacaagaagcugaagcagccggccgacgggaaccccgaccccaacgccaaccccaacguggacccgaacgccaaccccaacgucgaccccaacgccaaccccaacguggacccgaacgcgaaccccaacgccaaccccaacgccaaccccaacgccaacccgaacgcgaaccccaacgccaaccccaacgccaaccccaacgccaacccgaacgccaaccccaacgcgaaccccaacgccaaccccaacgccaacccgaacgccaaccccaacgccaaccccaacgcgaaccccaacgccaacccgaacgccaaccccaacguggaccccaacgccaaccccaacgccaacccgaacgcgaaccccaacgccaaccccaacgccaacccgaacgccaaccccaacgccaaccccaacgcgaaccccaacgccaacccgaacgccaaccccaacgccaaccccaacgcgaaccccaacgccaacccgaacgccaaccccaacgccaaccccaacgccaaccccaacgcgaacccgaacgccaaccccaacaagaacaaccagggcaacggccaggggcacaacaugcccaacgaccccaaccgcaacgucgacgagaacgccaacgccaacuccgccgugaagaacaacaacaacgaggagccgagcgacaagcacaucaaggaguaccugaacaagauccagaacucccucagcacggaguggucccccugcagcgugaccugcggcaacgggauccagguccggaucaagcccggcuccgcgaacaagcccaaggacgagcuggacuacgccaacgacaucgagaagaagaucugcaagauggagaagugcagcuccguguucaacguggucaacagcuccagcggcgggcugagcaaggacaucaucaagcuccugaacgagcaggugaacaaggagaugaacuccagcaaccuguacauguccaugagcuccuggugcuacacccacagccucgacggcgccgggcuguuccuguucgaccacgccgcggaggaguacgagcacgccaagaagcucaucaucuuccugaacgagaacaacguccccgugcagcugaccuccaucagcgccccggagcacaaguucgagggccucacgcagaucuuccagaaggccuacgagcacgagcagcacaucuccgagagcaucaacaacaucguggaccacgccaucaaguccaaggaccacgcgaccuucaacuuccugcagugguacgucgccgagcagcacgaggaggaggugcuguucaaggacauccucgacaagaucgagcugaucgggaacgagaaccacggccuguaccucgccgaccaguacgugaaggggaucgccaagagccgcaaguccugaggacuaguuauaagacugacuagcccgaugggccucccaacgggcccuccuccccuccuugcaccgagauuaaucaaaggcucuuuucagagccaccaaaaaaaaaaaaaaaaaaaaaaaaaaaaaaaaaaaaaaaaaaaaaaaaaaaaaaaaaaaaaaaaaaaaaaaaaaaaaaaaaaaaaaaaaaaaaaaaaaaaa

SEQ ID NO: 9986 - RNA, 1875 nt, Artificial Sequence
  mRNA Design i-3 (hSL-A100) comprising derived and/or modified sequence from Pf(3D7)__XP_001351122.1__HsALB_Pf-CSP(19-384)_L(SGG)_Ferritin (opt1)
aggagaaagcuuaccaugaagugggugaccuucaucagccuccuguuccuguucuccagcgccuacucccuguuccaggaguaccagugcuacggcuccagcuccaacacccgggugcucaacgagcugaacuacgacaacgcggggaccaaccuguacaacgagcucgagaugaacuacuacggcaagcaggagaacugguacagccugaagaagaacucccgcagccugggggagaacgacgacggcaacaacgaggacaacgagaagcuccggaagcccaagcacaagaagcugaagcagccggccgacgggaaccccgaccccaacgccaaccccaacguggacccgaacgccaaccccaacgucgaccccaacgccaaccccaacguggacccgaacgcgaaccccaacgccaaccccaacgccaaccccaacgccaacccgaacgcgaaccccaacgccaaccccaacgccaaccccaacgccaacccgaacgccaaccccaacgcgaaccccaacgccaaccccaacgccaacccgaacgccaaccccaacgccaaccccaacgcgaaccccaacgccaacccgaacgccaaccccaacguggaccccaacgccaaccccaacgccaacccgaacgcgaaccccaacgccaaccccaacgccaacccgaacgccaaccccaacgccaaccccaacgcgaaccccaacgccaacccgaacgccaaccccaacgccaaccccaacgcgaaccccaacgccaacccgaacgccaaccccaacgccaaccccaacgccaaccccaacgcgaacccgaacgccaaccccaacaagaacaaccagggcaacggccaggggcacaacaugcccaacgaccccaaccgcaacgucgacgagaacgccaacgccaacuccgccgugaagaacaacaacaacgaggagccgagcgacaagcacaucaaggaguaccugaacaagauccagaacucccucagcacggaguggucccccugcagcgugaccugcggcaacgggauccagguccggaucaagcccggcuccgcgaacaagcccaaggacgagcuggacuacgccaacgacaucgagaagaagaucugcaagauggagaagugcagcuccguguucaacguggucaacagcuccagcggcgggcugagcaaggacaucaucaagcuccugaacgagcaggugaacaaggagaugaacuccagcaaccuguacauguccaugagcuccuggugcuacacccacagccucgacggcgccgggcuguuccuguucgaccacgccgcggaggaguacgagcacgccaagaagcucaucaucuuccugaacgagaacaacguccccgugcagcugaccuccaucagcgccccggagcacaaguucgagggccucacgcagaucuuccagaaggccuacgagcacgagcagcacaucuccgagagcaucaacaacaucguggaccacgccaucaaguccaaggaccacgcgaccuucaacuuccugcagugguacgucgccgagcagcacgaggaggaggugcuguucaaggacauccucgacaagaucgagcugaucgggaacgagaaccacggccuguaccucgccgaccaguacgugaaggggaucgccaagagccgcaaguccugaggacuaguuauaagacugacuagcccgaugggccucccaacgggcccuccuccccuccuugcaccgagauuaaucaaaggcucuuuucagagccaccaaaaaaaaaaaaaaaaaaaaaaaaaaaaaaaaaaaaaaaaaaaaaaaaaaaaaaaaaaaaaaaaaaaaaaaaaaaaaaaaaaaaaaaaaaaaaaaaaaaaa

SEQ ID NO: 9987 - RNA, 1836 nt, Artificial Sequence
  mRNA Design i-3 (hSL-A100) comprising derived and/or modified sequence from Pf(3D7)__XP_001351122.1__HsALB_Pf-CSP(93-384)_L(PVTN)_HBsAg (opt1)
aggagaaagcuuaccaugaagugggugaccuucaucagccugcucuuccuguucuccagcgccuacuccaagcugaagcagccggccgacgggaaccccgaccccaacgccaaccccaacguggacccgaacgccaaccccaacgucgaccccaacgccaaccccaacguggacccgaacgcgaaccccaacgccaaccccaacgccaaccccaacgccaacccgaacgcgaaccccaacgccaaccccaacgccaaccccaacgccaacccgaacgccaaccccaacgcgaaccccaacgccaaccccaacgccaacccgaacgccaaccccaacgccaaccccaacgcgaaccccaacgccaacccgaacgccaaccccaacguggaccccaacgccaaccccaacgccaacccgaacgcgaaccccaacgccaaccccaacgccaacccgaacgccaaccccaacgccaaccccaacgcgaaccccaacgccaacccgaacgccaaccccaacgccaaccccaacgcgaaccccaacgccaacccgaacgccaaccccaacgccaaccccaacgccaaccccaacgcgaacccgaacgccaaccccaacaagaacaaccagggcaacggccaggggcacaacaugcccaacgaccccaaccgcaacgucgacgagaacgccaacgccaacuccgccgugaagaacaacaacaacgaggagccgagcgacaagcacaucaaggaguaccugaacaagauccagaacucccucagcacggaguggucccccugcagcgugaccugcggcaacgggauccagguccggaucaagcccggcuccgcgaacaagcccaaggacgagcuggacuacgccaacgacaucgagaagaagaucugcaagauggagaagugcagcuccguguucaacguggucaacagcuccccggugacgaacauggagaacaucaccagcggcuuccuggggccccuccuggugcugcaggccggcuucuuccuccugacccgcauccugaccaucccgcagucccucgacagcugguggaccucccugaacuuccucgggggcagccccgucugccuggggcagaacucccagagccccaccuccaaccacagccccaccuccugcccgcccaucugccccggcuaccgguggaugugccugcgccgguucaucaucuuccuguucauccuccugcugugccucaucuuccugcuggugcuccuggacuaccagggcaugcugcccgugugcccgcucauccccgggagcacgaccaccaacaccggccccugcaagacgugcaccacccccgcccaggggaacuccauguucccgagcugcugcugcaccaagcccacggacggcaacugcacgugcauccccauccccuccagcugggcguucgccaaguaccugugggagugggccuccguccgcuucagcuggcugucccuccuggugccguucgugcagugguucgucgggcugagccccaccguguggcucuccgccaucuggaugaugugguacuggggccccagccuguacagcaucgugucccccuucaucccgcugcuccccaucuucuucugccugugggucuacaucugaggacuaguuauaagacugacuagcccgaugggccucccaacgggcccuccuccccuccuugcaccgagauuaaucaaaggcucuuuucagagccaccaaaaaaaaaaaaaaaaaaaaaaaaaaaaaaaaaaaaaaaaaaaaaaaaaaaaaaaaaaaaaaaaaaaaaaaaaaaaaaaaaaaaaaaaaaaaaaaaaaaaa

SEQ ID NO: 9988 - RNA, 1836 nt, Artificial Sequence
  mRNA Design i-3 (hSL-A100) comprising derived and/or modified sequence from Pf(3D7)__XP_001351122.1__HsALB_Pf-CSP(93-384)_L(PVTN)_HBsAg (opt1)
aggagaaagcuuaccaugaagugggugaccuucaucagccuccuguuccuguucuccagcgccuacuccaagcugaagcagccggccgacgggaaccccgaccccaacgccaaccccaacguggacccgaacgccaaccccaacgucgaccccaacgccaaccccaacguggacccgaacgcgaaccccaacgccaaccccaacgccaaccccaacgccaacccgaacgcgaaccccaacgccaaccccaacgccaaccccaacgccaacccgaacgccaaccccaacgcgaaccccaacgccaaccccaacgccaacccgaacgccaaccccaacgccaaccccaacgcgaaccccaacgccaacccgaacgccaaccccaacguggaccccaacgccaaccccaacgccaacccgaacgcgaaccccaacgccaaccccaacgccaacccgaacgccaaccccaacgccaaccccaacgcgaaccccaacgccaacccgaacgccaaccccaacgccaaccccaacgcgaaccccaacgccaacccgaacgccaaccccaacgccaaccccaacgccaaccccaacgcgaacccgaacgccaaccccaacaagaacaaccagggcaacggccaggggcacaacaugcccaacgaccccaaccgcaacgucgacgagaacgccaacgccaacuccgccgugaagaacaacaacaacgaggagccgagcgacaagcacaucaaggaguaccugaacaagauccagaacucccucagcacggaguggucccccugcagcgugaccugcggcaacgggauccagguccggaucaagcccggcuccgcgaacaagcccaaggacgagcuggacuacgccaacgacaucgagaagaagaucugcaagauggagaagugcagcuccguguucaacguggucaacagcuccccggugacgaacauggagaacaucaccagcggcuuccuggggccccuccuggugcugcaggccggcuucuuccuccugacccgcauccugaccaucccgcagucccucgacagcugguggaccucccugaacuuccucgggggcagccccgucugccuggggcagaacucccagagccccaccuccaaccacagccccaccuccugcccgcccaucugccccggcuaccgguggaugugccugcgccgguucaucaucuuccuguucauccuccugcugugccucaucuuccugcuggugcuccuggacuaccagggcaugcugcccgugugcccgcucauccccgggagcacgaccaccaacaccggccccugcaagacgugcaccacccccgcccaggggaacuccauguucccgagcugcugcugcaccaagcccacggacggcaacugcacgugcauccccauccccuccagcugggcguucgccaaguaccugugggagugggccuccguccgcuucagcuggcugucccuccuggugccguucgugcagugguucgucgggcugagccccaccguguggcucuccgccaucuggaugaugugguacuggggccccagccuguacagcaucgugucccccuucaucccgcugcuccccaucuucuucugccugugggucuacaucugaggacuaguuauaagacugacuagcccgaugggccucccaacgggcccuccuccccuccuugcaccgagauuaaucaaaggcucuuuucagagccaccaaaaaaaaaaaaaaaaaaaaaaaaaaaaaaaaaaaaaaaaaaaaaaaaaaaaaaaaaaaaaaaaaaaaaaaaaaaaaaaaaaaaaaaaaaaaaaaaaaaaa

SEQ ID NO: 9989 - RNA, 1497 nt, Artificial Sequence; identical to SEQ ID NO: 8531
  mRNA Design i-3 (hSL-A100) comprising derived and/or modified sequence from Pf(3D7)__XP_001351122.1__HsALB_Pf-CSP(199-377)_L(PVTN)_HBsAg (opt1)

SEQ ID NO: 9990 - RNA, 1194 nt, Artificial Sequence; identical to SEQ ID NO: 8515
  mRNA Design i-3 (hSL-A100) comprising derived and/or modified sequence from Pf(3D7)__XP_001351122.1__HsALB_Pf-CSP(19-272)_L(AAY)_Pf-CSP(310-3 27)_L(AAY)_Pf-CSP(346-375) (opt1)

SEQ ID NO: 9991 - RNA, 1194 nt, Artificial Sequence
  mRNA Design i-3 (hSL-A100) comprising derived and/or modified sequence from Pf(3D7)__XP_001351122.1__HsALB_Pf-CSP(19-272)_L(AAY)_Pf-CSP(346-3 75)_L(AAY)_Pf-CSP(310-327) (opt1)
aggagaaagcuuaccaugaagugggugaccuucaucagccuccuguuccuguucuccagcgccuacucccuguuccaggaguaccagugcuacggcuccagcuccaacacccgggugcucaacgagcugaacuacgacaacgcggggaccaaccuguacaacgagcucgagaugaacuacuacggcaagcaggagaacugguacagccugaagaagaacucccgcagccugggggagaacgacgacggcaacaacgaggacaacgagaagcuccggaagcccaagcacaagaagcugaagcagccggccgacgggaaccccgaccccaacgccaaccccaacguggacccgaacgccaaccccaacgucgaccccaacgccaaccccaacguggacccgaacgcgaaccccaacgccaaccccaacgccaaccccaacgccaacccgaacgcgaaccccaacgccaaccccaacgccaaccccaacgccaacccgaacgccaaccccaacgcgaaccccaacgccaaccccaacgccaacccgaacgccaaccccaacgccaaccccaacgcgaaccccaacgccaacccgaacgccaaccccaacguggaccccaacgccaaccccaacgccaacccgaacgcgaaccccaacgccaaccccaacgccaacccgaacgccaaccccaacgccaaccccaacgcgaaccccaacgccaacccgaacgccaaccccaacgccaaccccaacgcgaaccccaacgccaacccgaacgccaaccccaacgccaaccccaacgccaaccccaacgcgaacccgaacgccaaccccgcggccuacaucaagcccggcuccgcgaacaagcccaaggacgagcuggacuacgccaacgacaucgagaagaagaucugcaagauggagaagugcagcgccgcguaugagccgagcgacaagcacaucaaggaguaccugaacaagauccagaacucccucugaggacuaguuauaagacugacuagcccgaugggccucccaacgggcccuccuccccuccuugcaccgagauuaaucaaaggcucuuuucagagccaccaaaaaaaaaaaaaaaaaaaaaaaaaaaaaaaaaaaaaaaaaaaaaaaaaaaaaaaaaaaaaaaaaaaaaaaaaaaaaaaaaaaaaaaaaaaaaaaaaaaaa

SEQ ID NO: 9992 - RNA, 1242 nt, Artificial Sequence
  mRNA Design i-3 (hSL-A100) comprising derived and/or modified sequence from Pf(3D7)__XP_001351122.1__HsALB_Pf-CSP(19-272)_L(AAY)_Pf-CSP(346-3 75)_L(AAY)_Pf-CSP(310-327)_L(AAY)_PADRE (opt1)
aggagaaagcuuaccaugaagugggugaccuucaucagccuccuguuccuguucuccagcgccuacucccuguuccaggaguaccagugcuacggcuccagcuccaacacccgggugcucaacgagcugaacuacgacaacgcggggaccaaccuguacaacgagcucgagaugaacuacuacggcaagcaggagaacugguacagccugaagaagaacucccgcagccugggggagaacgacgacggcaacaacgaggacaacgagaagcuccggaagcccaagcacaagaagcugaagcagccggccgacgggaaccccgaccccaacgccaaccccaacguggacccgaacgccaaccccaacgucgaccccaacgccaaccccaacguggacccgaacgcgaaccccaacgccaaccccaacgccaaccccaacgccaacccgaacgcgaaccccaacgccaaccccaacgccaaccccaacgccaacccgaacgccaaccccaacgcgaaccccaacgccaaccccaacgccaacccgaacgccaaccccaacgccaaccccaacgcgaaccccaacgccaacccgaacgccaaccccaacguggaccccaacgccaaccccaacgccaacccgaacgcgaaccccaacgccaaccccaacgccaacccgaacgccaaccccaacgccaaccccaacgcgaaccccaacgccaacccgaacgccaaccccaacgccaaccccaacgcgaaccccaacgccaacccgaacgccaaccccaacgccaaccccaacgccaaccccaacgcgaacccgaacgccaaccccgccgcguauaucaagcccggcuccgcgaacaagcccaaggacgagcuggacuacgccaacgacaucgagaagaagaucugcaagauggagaagugcagcgcggccuacgagccgagcgacaagcacaucaaggaguaccugaacaagauccagaacucccucgccgccuacgccaaguucguggccgccuggacccugaaggcggccgccugaggacuaguuauaagacugacuagcccgaugggccucccaacgggcccuccuccccuccuugcaccgagauuaaucaaaggcucuuuucagagccaccaaaaaaaaaaaaaaaaaaaaaaaaaaaaaaaaaaaaaaaaaaaaaaaaaaaaaaaaaaaaaaaaaaaaaaaaaaaaaaaaaaaaaaaaaaaaaaaaaaaaa

SEQ ID NO: 9993 - RNA, 1242 nt, Artificial Sequence
  mRNA Design i-3 (hSL-A100) comprising derived and/or modified sequence from Pf(3D7)__XP_001351122.1__HsALB_Pf-CSP(19-272)_L(AAY)_Pf-CSP(310-3 27)_L(AAY)_Pf-CSP(346-375)_L(AAY)_PADRE (opt1)
aggagaaagcuuaccaugaagugggugaccuucaucagccuccuguuccuguucuccagcgccuacucccuguuccaggaguaccagugcuacggcuccagcuccaacacccgggugcucaacgagcugaacuacgacaacgcggggaccaaccuguacaacgagcucgagaugaacuacuacggcaagcaggagaacugguacagccugaagaagaacucccgcagccugggggagaacgacgacggcaacaacgaggacaacgagaagcuccggaagcccaagcacaagaagcugaagcagccggccgacgggaaccccgaccccaacgccaaccccaacguggacccgaacgccaaccccaacgucgaccccaacgccaaccccaacguggacccgaacgcgaaccccaacgccaaccccaacgccaaccccaacgccaacccgaacgcgaaccccaacgccaaccccaacgccaaccccaacgccaacccgaacgccaaccccaacgcgaaccccaacgccaaccccaacgccaacccgaacgccaaccccaacgccaaccccaacgcgaaccccaacgccaacccgaacgccaaccccaacguggaccccaacgccaaccccaacgccaacccgaacgcgaaccccaacgccaaccccaacgccaacccgaacgccaaccccaacgccaaccccaacgcgaaccccaacgccaacccgaacgccaaccccaacgccaaccccaacgcgaaccccaacgccaacccgaacgccaaccccaacgccaaccccaacgccaaccccaacgcgaacccgaacgccaaccccgccgcguaugagccgagcgacaagcacaucaaggaguaccugaacaagauccagaacucccucgcggccuacaucaagcccggcuccgcgaacaagcccaaggacgagcuggacuacgccaacgacaucgagaagaagaucugcaagauggagaagugcagcgccgccuacgccaaguucguggccgccuggacccugaaggcggccgccugaggacuaguuauaagacugacuagcccgaugggccucccaacgggcccuccuccccuccuugcaccgagauuaaucaaaggcucuuuucagagccaccaaaaaaaaaaaaaaaaaaaaaaaaaaaaaaaaaaaaaaaaaaaaaaaaaaaaaaaaaaaaaaaaaaaaaaaaaaaaaaaaaaaaaaaaaaaaaaaaaaaaa

SEQ ID NO: 9994 - RNA, 1296 nt, Artificial Sequence
  mRNA Design i-3 (hSL-A100) comprising derived and/or modified sequence from Pf(3D7)__XP_001351122.1__HsALB_Pf-CSP(19-272)_L(AAY)_Pf-CSP(310-3 27)_L(AAY)_Pf-CSP(346-375)_L(AAY)_PADRE_L(AAY)_P2 (opt1)
aggagaaagcuuaccaugaagugggugaccuucaucagccuccuguuccuguucuccagcgccuacucccuguuccaggaguaccagugcuacggcuccagcuccaacacccgggugcucaacgagcugaacuacgacaacgcggggaccaaccuguacaacgagcucgagaugaacuacuacggcaagcaggagaacugguacagccugaagaagaacucccgcagccugggggagaacgacgacggcaacaacgaggacaacgagaagcuccggaagcccaagcacaagaagcugaagcagccggccgacgggaaccccgaccccaacgccaaccccaacguggacccgaacgccaaccccaacgucgaccccaacgccaaccccaacguggacccgaacgcgaaccccaacgccaaccccaacgccaaccccaacgccaacccgaacgcgaaccccaacgccaaccccaacgccaaccccaacgccaacccgaacgccaaccccaacgcgaaccccaacgccaaccccaacgccaacccgaacgccaaccccaacgccaaccccaacgcgaaccccaacgccaacccgaacgccaaccccaacguggaccccaacgccaaccccaacgccaacccgaacgcgaaccccaacgccaaccccaacgccaacccgaacgccaaccccaacgccaaccccaacgcgaaccccaacgccaacccgaacgccaaccccaacgccaaccccaacgcgaaccccaacgccaacccgaacgccaaccccaacgccaaccccaacgccaaccccaacgcgaacccgaacgccaaccccgcggccuacgagccgagcgacaagcacaucaaggaguaccugaacaagauccagaacucccucgccgcguauaucaagcccggcuccgcgaacaagcccaaggacgagcuggacuacgccaacgacaucgagaagaagaucugcaagauggagaagugcagcgccgccuacgccaaguucguggccgccuggacccugaaggcggccgccgccgcuuaccaguacaucaaggccaacagcaaguucaucggcaucaccgagcugugaggacuaguuauaagacugacuagcccgaugggccucccaacgggcccuccuccccuccuugcaccgagauuaaucaaaggcucuuuucagagccaccaaaaaaaaaaaaaaaaaaaaaaaaaaaaaaaaaaaaaaaaaaaaaaaaaaaaaaaaaaaaaaaaaaaaaaaaaaaaaaaaaaaaaaaaaaaaaaaaaaaaa

SEQ ID NO: 9995 - RNA, 1260 nt, Artificial Sequence
  mRNA Design i-3 (hSL-A100) comprising derived and/or modified sequence from Pf(3D7)__XP_001351122.1__HsALB_Pf-CSP(19-272)_L(AAY)_Pf-CSP(310-3 27)_Linker (AAY)_Pf-CSP(346-397) (opt1)
aggagaaagcuuaccaugaagugggugaccuucaucagccuccuguuccuguucuccagcgccuacucccuguuccaggaguaccagugcuacggcuccagcuccaacacccgggugcucaacgagcugaacuacgacaacgcggggaccaaccuguacaacgagcucgagaugaacuacuacggcaagcaggagaacugguacagccugaagaagaacucccgcagccugggggagaacgacgacggcaacaacgaggacaacgagaagcuccggaagcccaagcacaagaagcugaagcagccggccgacgggaaccccgaccccaacgccaaccccaacguggacccgaacgccaaccccaacgucgaccccaacgccaaccccaacguggacccgaacgcgaaccccaacgccaaccccaacgccaaccccaacgccaacccgaacgcgaaccccaacgccaaccccaacgccaaccccaacgccaacccgaacgccaaccccaacgcgaaccccaacgccaaccccaacgccaacccgaacgccaaccccaacgccaaccccaacgcgaaccccaacgccaacccgaacgccaaccccaacguggaccccaacgccaaccccaacgccaacccgaacgcgaaccccaacgccaaccccaacgccaacccgaacgccaaccccaacgccaaccccaacgcgaaccccaacgccaacccgaacgccaaccccaacgccaaccccaacgcgaaccccaacgccaacccgaacgccaaccccaacgccaaccccaacgccaaccccaacgcgaacccgaacgccaaccccgcggccuacgagccgagcgacaagcacaucaaggaguaccugaacaagauccagaacucccucgccgcguauaucaagcccggcuccgcgaacaagcccaaggacgagcuggacuacgccaacgacaucgagaagaagaucugcaagauggagaagugcagcuccguguucaacguggucaacagcuccaucgggcugaucauggugcucagcuuccuguuccugaacugaggacuaguuauaagacugacuagcccgaugggccucccaacgggcccuccuccccuccuugcaccgagauuaaucaaaggcucuuuucagagccaccaaaaaaaaaaaaaaaaaaaaaaaaaaaaaaaaaaaaaaaaaaaaaaaaaaaaaaaaaaaaaaaaaaaaaaaaaaaaaaaaaaaaaaaaaaaaaaaaaaaaa

SEQ ID NO: 9996 - RNA, 1860 nt, Artificial Sequence
  mRNA Design i-3 (hSL-A100) comprising derived and/or modified sequence from Pf(3D7)__XP_001351122.1__LumSynt_L(GGS4-GGG)_Pf-CSP(19-397) (opt1)
aggagaaagcuuaccaugcagaucuacgagggcaagcugaccgccgaggggcuccgcuucggcaucguggccagccgguucaaccacgcgcuggucgaccgccugguggagggggccaucgacgccaucgugcggcacggcgggcgcgaggaggacaucacccucguccgggugcccggcuccugggagaucccgguggccgccggcgagcuggcgcgcaaggaggacaucgacgccgucaucgccaucggggugcugauccggggcgccacgccccacuucgacuacaucgcgagcgagguguccaaggggcucgccgaccugagccuggagcuccgcaagcccaucaccuucggcgucaucaccgccgacacccuggagcaggccaucgagcgggccgggacgaagcacggcaacaagggcugggaggcggcccuguccgccaucgagauggccaaccucuucaagagccugcgcgggggcuccgggggcagcggcggguccggcgggagcggcgggggccuguuccaggaguaccagugcuacggcuccagcuccaacacccgggugcucaacgagcugaacuacgacaacgccgggaccaaccuguacaacgagcucgagaugaacuacuacggcaagcaggagaacugguacagccugaagaagaacucccgcagccugggggagaacgacgacggcaacaacgaggacaacgagaagcuccggaagcccaagcacaagaagcugaagcagccggcggacgggaaccccgaccccaacgccaaccccaacguggacccgaacgccaaccccaacgucgaccccaacgccaaccccaacguggacccgaacgccaaccccaacgcgaaccccaacgccaaccccaacgccaacccgaacgccaaccccaacgccaaccccaacgcgaaccccaacgccaacccgaacgccaaccccaacgccaaccccaacgcgaaccccaacgccaacccgaacgccaaccccaacgccaaccccaacgccaaccccaacgcgaacccgaacgccaaccccaacguggaccccaacgccaacccgaacgccaaccccaacgccaaccccaacgcgaaccccaacgccaacccgaacgccaaccccaacgccaaccccaacgccaaccccaacgcgaacccgaacgccaaccccaacgccaaccccaacgccaaccccaacgcgaacccgaacgccaaccccaacgccaaccccaacgccaaccccaacgccaacccgaacgcgaaccccaacaagaacaaccagggcaacggccaggggcacaacaugcccaacgaccccaaccgcaacgucgacgagaacgccaacgccaacuccgccgugaagaacaacaacaacgaggagccgagcgacaagcacaucaaggaguaccugaacaagauccagaacucccucagcaccgaguggagccccugcuccgugacgugcggcaacgggauccagguccggaucaagcccggcagcgccaacaagcccaaggacgagcuggacuacgcgaacgacaucgagaagaagaucugcaagauggagaagugcuccagcguguucaacguggucaacuccagcaucgggcugaucauggugcucuccuuccuguuccugaacugaggacuaguuauaagacugacuagcccgaugggccucccaacgggcccuccuccccuccuugcaccgagauuaaucaaaggcucuuuucagagccaccaaaaaaaaaaaaaaaaaaaaaaaaaaaaaaaaaaaaaaaaaaaaaaaaaaaaaaaaaaaaaaaaaaaaaaaaaaaaaaaaaaaaaaaaaaaaaaaaaaaaa

SEQ ID NO: 9997 - RNA, 1722 nt, Artificial Sequence
  mRNA Design i-3 (hSL-A100) comprising derived and/or modified sequence from Pf(3D7)__XP_001351122.1__HsALB_Pf-CSP(19-272)_L(PVTN)_HBsAg (opt1)
aggagaaagcuuaccaugaagugggugaccuucaucagccuccuguuccuguucuccagcgccuacucccuguuccaggaguaccagugcuacggcagcuccagcaacacccgcguccucaacgagcugaacuacgacaacgccgggaccaaccuguacaacgagcucgagaugaacuacuacggcaagcaggagaacugguacucccugaagaagaacagccggucccugggggagaacgacgacggcaacaacgaggacaacgagaagcuccgcaagcccaagcacaagaagcugaagcagccggcggacgggaaccccgaccccaacgccaaccccaacguggacccgaacgccaaccccaacguggaccccaacgccaaccccaacgucgacccgaacgccaaccccaacgcgaaccccaacgccaaccccaacgccaacccgaacgccaaccccaacgcgaaccccaacgccaaccccaacgccaacccgaacgccaaccccaacgccaaccccaacgcgaaccccaacgccaacccgaacgccaaccccaacgccaaccccaacgccaaccccaacgcgaacccgaacgccaaccccaacguggaccccaacgccaaccccaacgccaacccgaacgccaaccccaacgcgaaccccaacgccaacccgaacgccaaccccaacgccaaccccaacgccaaccccaacgcgaacccgaacgccaaccccaacgccaaccccaacgccaaccccaacgcgaacccgaacgccaaccccaacgccaaccccaacgccaaccccaacgccaacccgaacgcgaacccgcccgugaccaacauggagaacaucaccagcggcuuccugggcccccuccugguccugcaggccggguucuuccuccugacccggauccugacgaucccccagucccucgacagcugguggaccucccugaacuuccugggcgggagccccgugugccucggccagaacucccagagccccaccuccaaccacagccccaccuccugcccgcccaucugccccggguaccgcuggaugugccugcggcgcuucaucaucuuccuguucauccuccugcugugccucaucuuccugcuggugcuccuggacuaccagggcaugcugcccgucugcccgcucauccccggcagcacgaccaccaacaccgggcccugcaagacgugcaccaccccggcccagggcaacagcauguuccccuccugcugcugcaccaagcccacggacgggaacugcacgugcauccccaucccgagcuccugggccuucgccaaguaccugugggagugggcgagcgugcgguucuccuggcugagccuccuggugcccuucguccagugguucgugggccugucccccaccguguggcucagcgccaucuggaugaugugguacuggggccccucccuguacagcaucgucuccccguucaucccccugcuccccaucuucuucugccuguggguguacaucugaggacuaguuauaagacugacuagcccgaugggccucccaacgggcccuccuccccuccuugcaccgagauuaaucaaaggcucuuuucagagccaccaaaaaaaaaaaaaaaaaaaaaaaaaaaaaaaaaaaaaaaaaaaaaaaaaaaaaaaaaaaaaaaaaaaaaaaaaaaaaaaaaaaaaaaaaaaaaaaaaaaaa

SEQ ID NO: 9998 - RNA, 1839 nt, Artificial Sequence
  mRNA Design i-3 (hSL-A100) comprising derived and/or modified sequence from Pf(3D7)__XP_001351122.1__HsALB_Pf-CSP(19-272)_L(AAY)_Pf-CSP(346-3 65)_L(AAY)_PADRE_L(PVTN)_HBsAg (opt1)
aggagaaagcuuaccaugaagugggugaccuucaucagccugcuguuccuguucuccagcgccuacucccuguuccaggaguaccagugcuacggcagcuccagcaacacccgcguccucaacgagcugaacuacgacaacgccgggaccaaccuguacaacgagcucgagaugaacuacuacggcaagcaggagaacugguacucccugaagaagaacagccggucccugggggagaacgacgacggcaacaacgaggacaacgagaagcuccgcaagcccaagcacaagaagcugaagcagccggcggacgggaaccccgaccccaacgccaaccccaacguggacccgaacgccaaccccaacguggaccccaacgccaaccccaacgucgacccgaacgccaaccccaacgcgaaccccaacgccaaccccaacgccaacccgaacgccaaccccaacgcgaaccccaacgccaaccccaacgccaacccgaacgccaaccccaacgccaaccccaacgcgaaccccaacgccaacccgaacgccaaccccaacgccaaccccaacgccaaccccaacgcgaacccgaacgccaaccccaacguggaccccaacgccaaccccaacgccaacccgaacgccaaccccaacgcgaaccccaacgccaacccgaacgccaaccccaacgccaaccccaacgccaaccccaacgcgaacccgaacgccaaccccaacgccaaccccaacgccaaccccaacgcgaacccgaacgccaaccccaacgccaaccccaacgccaaccccaacgccaacccgaacgcgaaccccgccgccuacaucaagcccggcagcgccaacaagcccaaggacgagcuggacuacgccaacgacaucgaggcggccuacgccaaguucguggccgccuggacccucaaggcggccgccccggucaccaacauggagaacaucaccuccggcuuccuggggccccugcucgugcugcaggccggcuucuuccugcucacgcggauccugaccaucccccagagccuggacuccugguggaccagccucaacuuccucgggggcucccccgugugccuggggcagaacagccaguccccgaccagcaaccacucccccacgagcugcccgcccaucugccccggcuaccgcuggaugugccuccggcgcuucaucaucuuccuguucauccugcuccugugccugaucuuccuccugguccugcucgacuaccagggcaugcugcccgugugcccccugaucccggggagcaccaccaccaacacgggccccugcaagaccugcaccacccccgcgcaggggaacuccauguuccccagcugcugcugcacgaagccgaccgacggcaacugcacgugcauccccauccccuccagcugggccuucgccaaguaccucugggagugggccuccgugcgguucagcuggcugucccugcucguccccuucgugcagugguucgugggccugagcccgaccgucuggcuguccgccaucuggaugaugugguacugggggcccagccucuacuccaucgugagccccuucaucccccugcugccgaucuucuucugccucuggguguacaucugaggacuaguuauaagacugacuagcccgaugggccucccaacgggcccuccuccccuccuugcaccgagauuaaucaaaggcucuuuucagagccaccaaaaaaaaaaaaaaaaaaaaaaaaaaaaaaaaaaaaaaaaaaaaaaaaaaaaaaaaaaaaaaaaaaaaaaaaaaaaaaaaaaaaaaaaaaaaaaaaaaaaa

SEQ ID NO: 9999 - RNA, 2058 nt, Artificial Sequence
  mRNA Design i-3 (hSL-A100) comprising derived and/or modified sequence from Pf(3D7)__XP_001351122.1__HsALB_Pf-CSP(19-384)_L(PVTN)_HBsAg (opt1)
aggagaaagcuuaccaugaagugggugaccuucaucagccugcuguuccuguucuccagcgccuacucccuguuccaggaguaccagugcuacggcagcuccagcaacacccgcguccucaacgagcugaacuacgacaacgccgggacgaaccuguacaacgagcucgagaugaacuacuacggcaagcaggagaacugguacucccugaagaagaacagccggucccugggggagaacgacgacggcaacaacgaggacaacgagaagcuccgcaagcccaagcacaagaagcugaagcagccggcggacgggaaccccgaccccaacgccaaccccaacguggacccgaacgccaaccccaacguggaccccaacgccaaccccaacgucgacccgaacgccaaccccaacgcgaaccccaacgccaaccccaacgccaacccgaacgccaaccccaacgcgaaccccaacgccaaccccaacgccaacccgaacgccaaccccaacgccaaccccaacgcgaaccccaacgccaacccgaacgccaaccccaacgccaaccccaacgccaaccccaacgcgaacccgaacgccaaccccaacguggaccccaacgccaaccccaacgccaacccgaacgccaaccccaacgcgaaccccaacgccaacccgaacgccaaccccaacgccaaccccaacgccaaccccaacgcgaacccgaacgccaaccccaacgccaaccccaacgccaaccccaacgcgaacccgaacgccaaccccaacgccaaccccaacgccaaccccaacgccaacccgaacgcgaaccccaacaagaacaaccagggcaacggccaggggcacaacaugcccaacgaccccaaccggaacguggacgagaacgccaacgccaacagcgccgucaagaacaacaacaacgaggagccguccgacaagcacaucaaggaguaccugaacaagauccagaacagccucuccaccgaguggagccccugcuccgugaccugcggcaacgggauccaggugcgcaucaagcccggcagcgccaacaagcccaaggacgagcuggacuacgcgaacgacaucgagaagaagaucugcaagauggagaagugcuccagcgucuucaacguggugaacuccagcccggucaccaacauggagaacaucacgagcggguuccugggcccccuccuggugcugcaggccggcuucuuccuccugacccggauccugaccaucccccagucccucgacagcugguggaccucccugaacuuccucgggggcagccccgugugccucgggcagaacucccagagcccgacguccaaccacagccccaccuccugcccgcccaucugccccggcuaccgcuggaugugccugcggcgcuucaucaucuuccuguucauccuccugcugugccucaucuuccugcugguccuccuggacuaccagggcaugcugcccgugugcccccucaucccggggagcaccaccacgaacaccggccccugcaagaccugcaccacgcccgcccaggggaacuccauguuccccagcugcugcugcaccaagccgaccgacggcaacugcacgugcauccccauccccuccagcugggccuucgccaaguaccugugggagugggcguccgugcgguucagcuggcugucccuccugguccccuucgugcagugguucguggggcugagcccgaccgucuggcucuccgccaucuggaugaugugguacuggggccccagccuguacagcaucgugucccccuucaucccccugcucccgaucuucuucugccuguggguguacaucugaggacuaguuauaagacugacuagcccgaugggccucccaacgggcccuccuccccuccuugcaccgagauuaaucaaaggcucuuuucagagccaccaaaaaaaaaaaaaaaaaaaaaaaaaaaaaaaaaaaaaaaaaaaaaaaaaaaaaaaaaaaaaaaaaaaaaaaaaaaaaaaaaaaaaaaaaaaaaaaaaaaaa

SEQ ID NO: 10000 - RNA, 1875 nt, Artificial Sequence
  mRNA Design i-3 (hSL-A100) comprising derived and/or modified sequence from Pf(3D7)__XP_001351122.1__HsALB_Pf-CSP(19-384)_L(SGG)_Ferritin (opt1)
aggagaaagcuuaccaugaagugggugaccuucaucagccuccuguuccuguucuccagcgccuacucccuguuccaggaguaccagugcuacggcagcuccagcaacacccggguccucaacgagcugaacuacgacaacgccgggacgaaccuguacaacgagcucgagaugaacuacuacggcaagcaggagaacugguacucccugaagaagaacagccggucccugggggagaacgacgacggcaacaacgaggacaacgagaagcuccgcaagcccaagcacaagaagcugaagcagccggcggacgggaaccccgaccccaacgccaaccccaacguggacccgaacgccaaccccaacguggaccccaacgccaaccccaacgucgacccgaacgccaaccccaacgcgaaccccaacgccaaccccaacgccaacccgaacgccaaccccaacgcgaaccccaacgccaaccccaacgccaacccgaacgccaaccccaacgccaaccccaacgcgaaccccaacgccaacccgaacgccaaccccaacgccaaccccaacgccaaccccaacgcgaacccgaacgccaaccccaacguggaccccaacgccaaccccaacgccaacccgaacgccaaccccaacgcgaaccccaacgccaacccgaacgccaaccccaacgccaaccccaacgccaaccccaacgcgaacccgaacgccaaccccaacgccaaccccaacgccaaccccaacgcgaacccgaacgccaaccccaacgccaaccccaacgccaaccccaacgccaacccgaacgcgaaccccaacaagaacaaccagggcaacggccaggggcacaacaugcccaacgaccccaaccggaacguggacgagaacgccaacgccaacagcgccgucaagaacaacaacaacgaggagccguccgacaagcacaucaaggaguaccugaacaagauccagaacagccucuccaccgaguggagccccugcuccgugaccugcggcaacgggauccaggugcgcaucaagcccggcagcgccaacaagcccaaggacgagcuggacuacgcgaacgacaucgagaagaagaucugcaagauggagaagugcuccagcgucuucaacguggugaacuccagcagcgggggccuguccaaggacaucaucaagcuccugaacgagcaggucaacaaggagaugaacagcuccaaccuguacaugagcauguccagcuggugcuacacccacucccucgacggcgccgggcuguuccuguucgaccacgccgccgaggaguacgagcacgccaagaagcucaucaucuuccugaacgagaacaacgugccggugcagcugacgagcaucuccgcgcccgagcacaaguucgagggccucacccagaucuuccagaaggccuacgagcacgagcagcacaucagcgaguccaucaacaacaucgucgaccacgccaucaagagcaaggaccacgccaccuucaacuuccugcagugguacguggcggagcagcacgaggaggaggugcuguucaaggacauccucgacaagaucgagcugaucgggaacgagaaccacggccuguaccucgccgaccaguacgucaagggcaucgccaagucccgcaagagcugaggacuaguuauaagacugacuagcccgaugggccucccaacgggcccuccuccccuccuugcaccgagauuaaucaaaggcucuuuucagagccaccaaaaaaaaaaaaaaaaaaaaaaaaaaaaaaaaaaaaaaaaaaaaaaaaaaaaaaaaaaaaaaaaaaaaaaaaaaaaaaaaaaaaaaaaaaaaaaaaaaaaa

SEQ ID NO: 10001 - RNA, 1836 nt, Artificial Sequence
  mRNA Design i-3 (hSL-A100) comprising derived and/or modified sequence from Pf(3D7)__XP_001351122.1__HsALB_Pf-CSP(93-384)_L(PVTN)_HBsAg (opt1)
aggagaaagcuuaccaugaagugggugaccuucaucagccuccuguuccuguucuccagcgccuacuccaagcugaagcagcccgccgacggcaacccggaccccaacgcgaaccccaacgucgaccccaacgccaacccgaacguggaccccaacgccaaccccaacguggaccccaacgccaacccgaacgccaaccccaacgcgaaccccaacgccaaccccaacgccaacccgaacgccaaccccaacgcgaaccccaacgccaaccccaacgccaacccgaacgccaaccccaacgccaaccccaacgcgaaccccaacgccaacccgaacgccaaccccaacgccaaccccaacgccaaccccaacgcgaacccgaacgucgaccccaacgccaaccccaacgccaaccccaacgccaacccgaacgccaaccccaacgcgaaccccaacgccaacccgaacgccaaccccaacgccaaccccaacgccaaccccaacgcgaacccgaacgccaaccccaacgccaaccccaacgccaaccccaacgcgaacccgaacgccaaccccaacgccaaccccaacgccaaccccaacgccaacccgaacaagaacaaccaggggaacggccaggggcacaacaugcccaacgaccccaaccgcaacguggacgagaacgcgaacgccaacagcgccgugaagaacaacaacaacgaggagcccuccgacaagcacaucaaggaguaccucaacaagauccagaacagccuguccaccgaguggagcccgugcuccgugaccugcggcaacgggauccagguccggaucaagcccggcagcgccaacaagcccaaggacgagcuggacuacgccaacgacaucgagaagaagaucugcaagauggagaagugcuccagcguguucaacgucgugaacuccagccccgugaccaacauggagaacaucaccuccggcuuccucgggccgcugcugguccuccaggcgggcuucuuccugcugacccgcauccucacgaucccccagagccuggacuccugguggaccagccugaacuuccucgggggcucccccgugugccuggggcagaacagccagagccccaccuccaaccacagcccgaccuccugcccgcccaucugccccggcuaccgguggaugugccugcgccgguucaucaucuuccucuucauccugcugcucugccugaucuuccugcucgugcugcuggacuaccagggcaugcuccccgucugcccccugauccccgggagcacgaccaccaacaccggcccgugcaagacgugcaccacccccgcccaggggaacuccauguuccccagcugcugcugcaccaagcccacggacggcaacugcacgugcaucccgauccccuccagcugggccuucgccaaguaccugugggagugggccuccgugcgcuucagcuggcucucccugcuggugcccuucguccagugguucgugggccucagccccaccguguggcuguccgcgaucuggaugaugugguacugggggccgagccuguacuccaucgucagccccuucaucccccuccugcccaucuucuucugccuguggguguacaucugaggacuaguuauaagacugacuagcccgaugggccucccaacgggcccuccuccccuccuugcaccgagauuaaucaaaggcucuuuucagagccaccaaaaaaaaaaaaaaaaaaaaaaaaaaaaaaaaaaaaaaaaaaaaaaaaaaaaaaaaaaaaaaaaaaaaaaaaaaaaaaaaaaaaaaaaaaaaaaaaaaaaa

SEQ ID NO: 10002 - RNA, 1497 nt, Artificial Sequence; identical to SEQ ID NO: 8561
  mRNA Design i-3 (hSL-A100) comprising derived and/or modified sequence from Pf(3D7)__XP_001351122.1__HsALB_Pf-CSP(199-377)_L(PVTN)_HBsAg (opt1)

SEQ ID NO: 10003 - RNA, 1194 nt, Artificial Sequence
  mRNA Design i-3 (hSL-A100) comprising derived and/or modified sequence from Pf(3D7)__XP_001351122.1__HsALB_Pf-CSP(19-272)_L(AAY)_Pf-CSP(346-3 75)_L(AAY)_Pf-CSP(310-327) (opt1)
aggagaaagcuuaccaugaagugggugaccuucaucagccuccuguuccuguucuccagcgccuacucccuguuccaggaguaccagugcuacggcagcuccagcaacacccgcguccucaacgagcugaacuacgacaacgccgggacgaaccuguacaacgagcucgagaugaacuacuacggcaagcaggagaacugguacucccugaagaagaacagccggucccugggggagaacgacgacggcaacaacgaggacaacgagaagcuccgcaagcccaagcacaagaagcugaagcagccggcggacgggaaccccgaccccaacgccaaccccaacguggacccgaacgccaaccccaacguggaccccaacgccaaccccaacgucgacccgaacgccaaccccaacgcgaaccccaacgccaaccccaacgccaacccgaacgccaaccccaacgcgaaccccaacgccaaccccaacgccaacccgaacgccaaccccaacgccaaccccaacgcgaaccccaacgccaacccgaacgccaaccccaacgccaaccccaacgccaaccccaacgcgaacccgaacgccaaccccaacguggaccccaacgccaaccccaacgccaacccgaacgccaaccccaacgcgaaccccaacgccaacccgaacgccaaccccaacgccaaccccaacgccaaccccaacgcgaacccgaacgccaaccccaacgccaaccccaacgccaaccccaacgcgaacccgaacgccaaccccaacgccaaccccaacgccaaccccaacgccaacccgaacgcgaaccccgccgccuacaucaagcccggcagcgccaacaagcccaaggacgagcuggacuacgccaacgacaucgagaagaagaucugcaagauggagaagugcuccgcggccuacgagccgagcgacaagcacaucaaggaguaccucaacaagauccagaacucccugugaggacuaguuauaagacugacuagcccgaugggccucccaacgggcccuccuccccuccuugcaccgagauuaaucaaaggcucuuuucagagccaccaaaaaaaaaaaaaaaaaaaaaaaaaaaaaaaaaaaaaaaaaaaaaaaaaaaaaaaaaaaaaaaaaaaaaaaaaaaaaaaaaaaaaaaaaaaaaaaaaaaaa

SEQ ID NO: 10004 - RNA, 1242 nt, Artificial Sequence
  mRNA Design i-3 (hSL-A100) comprising derived and/or modified sequence from Pf(3D7)__XP_001351122.1__HsALB_Pf-CSP(19-272)_L(AAY)_Pf-CSP(346-3 75)_L(AAY)_Pf-CSP(310-327)_L(AAY)_PADRE (opt1)
aggagaaagcuuaccaugaagugggugaccuucaucagccuccuguuccuguucuccagcgccuacucccuguuccaggaguaccagugcuacggcagcuccagcaacacccgcguccucaacgagcugaacuacgacaacgccgggacgaaccuguacaacgagcucgagaugaacuacuacggcaagcaggagaacugguacucccugaagaagaacagccggucccugggggagaacgacgacggcaacaacgaggacaacgagaagcuccgcaagcccaagcacaagaagcugaagcagccggcggacgggaaccccgaccccaacgccaaccccaacguggacccgaacgccaaccccaacguggaccccaacgccaaccccaacgucgacccgaacgccaaccccaacgcgaaccccaacgccaaccccaacgccaacccgaacgccaaccccaacgcgaaccccaacgccaaccccaacgccaacccgaacgccaaccccaacgccaaccccaacgcgaaccccaacgccaacccgaacgccaaccccaacgccaaccccaacgccaaccccaacgcgaacccgaacgccaaccccaacguggaccccaacgccaaccccaacgccaacccgaacgccaaccccaacgcgaaccccaacgccaacccgaacgccaaccccaacgccaaccccaacgccaaccccaacgcgaacccgaacgccaaccccaacgccaaccccaacgccaaccccaacgcgaacccgaacgccaaccccaacgccaaccccaacgccaaccccaacgccaacccgaacgcgaaccccgccgccuacaucaagcccggcagcgccaacaagcccaaggacgagcuggacuacgccaacgacaucgagaagaagaucugcaagauggagaagugcuccgcggccuacgagccgagcgacaagcacaucaaggaguaccucaacaagauccagaacucccuggccgccuacgccaaguucguggcggccuggacccugaaggccgccgcgugaggacuaguuauaagacugacuagcccgaugggccucccaacgggcccuccuccccuccuugcaccgagauuaaucaaaggcucuuuucagagccaccaaaaaaaaaaaaaaaaaaaaaaaaaaaaaaaaaaaaaaaaaaaaaaaaaaaaaaaaaaaaaaaaaaaaaaaaaaaaaaaaaaaaaaaaaaaaaaaaaaaaa

SEQ ID NO: 10005 - RNA, 1242 nt, Artificial Sequence
  mRNA Design i-3 (hSL-A100) comprising derived and/or modified sequence from Pf(3D7)__XP_001351122.1__HsALB_Pf-CSP(19-272)_L(AAY)_Pf-CSP(310-3 27)_L(AAY)_Pf-CSP(346-375)_L(AAY)_PADRE (opt1)
aggagaaagcuuaccaugaagugggugaccuucaucagccuccuguuccuguucuccagcgccuacucccuguuccaggaguaccagugcuacggcagcuccagcaacacccgcguccucaacgagcugaacuacgacaacgccgggacgaaccuguacaacgagcucgagaugaacuacuacggcaagcaggagaacugguacucccugaagaagaacagccggucccugggggagaacgacgacggcaacaacgaggacaacgagaagcuccgcaagcccaagcacaagaagcugaagcagccggcggacgggaaccccgaccccaacgccaaccccaacguggacccgaacgccaaccccaacguggaccccaacgccaaccccaacgucgacccgaacgccaaccccaacgcgaaccccaacgccaaccccaacgccaacccgaacgccaaccccaacgcgaaccccaacgccaaccccaacgccaacccgaacgccaaccccaacgccaaccccaacgcgaaccccaacgccaacccgaacgccaaccccaacgccaaccccaacgccaaccccaacgcgaacccgaacgccaaccccaacguggaccccaacgccaaccccaacgccaacccgaacgccaaccccaacgcgaaccccaacgccaacccgaacgccaaccccaacgccaaccccaacgccaaccccaacgcgaacccgaacgccaaccccaacgccaaccccaacgccaaccccaacgcgaacccgaacgccaaccccaacgccaaccccaacgccaaccccaacgccaacccgaacgcgaaccccgccgccuacgagcccagcgacaagcacaucaaggaguaccugaacaagauccagaacucccucgccgccuacaucaagcccggcagcgcgaacaagccgaaggacgagcuggacuacgccaacgacaucgagaagaagaucugcaagauggagaagugcuccgccgccuacgccaaguucguggcggccuggacccugaaggccgccgcgugaggacuaguuauaagacugacuagcccgaugggccucccaacgggcccuccuccccuccuugcaccgagauuaaucaaaggcucuuuucagagccaccaaaaaaaaaaaaaaaaaaaaaaaaaaaaaaaaaaaaaaaaaaaaaaaaaaaaaaaaaaaaaaaaaaaaaaaaaaaaaaaaaaaaaaaaaaaaaaaaaaaaa

SEQ ID NO: 10006 - RNA, 1296 nt, Artificial Sequence
  mRNA Design i-3 (hSL-A100) comprising derived and/or modified sequence from Pf(3D7)__XP_001351122.1__HsALB_Pf-CSP(19-272)_L(AAY)_Pf-CSP(310-3 27)_L(AAY)_Pf-CSP(346-375)_L(AAY)_PADRE_L(AAY)_P2 (opt1)
aggagaaagcuuaccaugaagugggugaccuucaucagccuccuguuccuguucuccagcgccuacucccuguuccaggaguaccagugcuacggcagcuccagcaacacccgcguccucaacgagcugaacuacgacaacgccgggacgaaccuguacaacgagcucgagaugaacuacuacggcaagcaggagaacugguacucccugaagaagaacagccggucccugggggagaacgacgacggcaacaacgaggacaacgagaagcuccgcaagcccaagcacaagaagcugaagcagccggcggacgggaaccccgaccccaacgccaaccccaacguggacccgaacgccaaccccaacguggaccccaacgccaaccccaacgucgacccgaacgccaaccccaacgcgaaccccaacgccaaccccaacgccaacccgaacgccaaccccaacgcgaaccccaacgccaaccccaacgccaacccgaacgccaaccccaacgccaaccccaacgcgaaccccaacgccaacccgaacgccaaccccaacgccaaccccaacgccaaccccaacgcgaacccgaacgccaaccccaacguggaccccaacgccaaccccaacgccaacccgaacgccaaccccaacgcgaaccccaacgccaacccgaacgccaaccccaacgccaaccccaacgccaaccccaacgcgaacccgaacgccaaccccaacgccaaccccaacgccaaccccaacgcgaacccgaacgccaaccccaacgccaaccccaacgccaaccccaacgccaacccgaacgcgaaccccgccgccuacgagcccagcgacaagcacaucaaggaguaccugaacaagauccagaacucccucgccgccuacaucaagcccggcagcgcgaacaagccgaaggacgagcuggacuacgccaacgacaucgagaagaagaucugcaagauggagaagugcuccgccgccuacgccaaguucguggcggccuggacccugaaggccgccgcggccgccuaccaguacaucaaggccaacagcaaguucaucggcaucaccgagcucugaggacuaguuauaagacugacuagcccgaugggccucccaacgggcccuccuccccuccuugcaccgagauuaaucaaaggcucuuuucagagccaccaaaaaaaaaaaaaaaaaaaaaaaaaaaaaaaaaaaaaaaaaaaaaaaaaaaaaaaaaaaaaaaaaaaaaaaaaaaaaaaaaaaaaaaaaaaaaaaaaaaaa

SEQ ID NO: 10007 - RNA, 1260 nt, Artificial Sequence
  mRNA Design i-3 (hSL-A100) comprising derived and/or modified sequence from Pf(3D7)__XP_001351122.1__HsALB_Pf-CSP(19-272)_L(AAY)_Pf-CSP(310-3 27)_Linker (AAY)_Pf-CSP(346-397) (opt1)
aggagaaagcuuaccaugaagugggugaccuucaucagccuccuguuccuguucuccagcgccuacucccuguuccaggaguaccagugcuacggcagcuccagcaacacccgcguccucaacgagcugaacuacgacaacgccgggacgaaccuguacaacgagcucgagaugaacuacuacggcaagcaggagaacugguacucccugaagaagaacagccggucccugggggagaacgacgacggcaacaacgaggacaacgagaagcuccgcaagcccaagcacaagaagcugaagcagccggcggacgggaaccccgaccccaacgccaaccccaacguggacccgaacgccaaccccaacguggaccccaacgccaaccccaacgucgacccgaacgccaaccccaacgcgaaccccaacgccaaccccaacgccaacccgaacgccaaccccaacgcgaaccccaacgccaaccccaacgccaacccgaacgccaaccccaacgccaaccccaacgcgaaccccaacgccaacccgaacgccaaccccaacgccaaccccaacgccaaccccaacgcgaacccgaacgccaaccccaacguggaccccaacgccaaccccaacgccaacccgaacgccaaccccaacgcgaaccccaacgccaacccgaacgccaaccccaacgccaaccccaacgccaaccccaacgcgaacccgaacgccaaccccaacgccaaccccaacgccaaccccaacgcgaacccgaacgccaaccccaacgccaaccccaacgccaaccccaacgccaacccgaacgcgaaccccgccgccuacgagcccagcgacaagcacaucaaggaguaccugaacaagauccagaacucccucgccgccuacaucaagcccggcagcgcgaacaagccgaaggacgagcuggacuacgccaacgacaucgagaagaagaucugcaagauggagaagugcuccagcguguucaacgucgugaacuccagcaucggccugaucauggugcucuccuuccuguuccugaacugaggacuaguuauaagacugacuagcccgaugggccucccaacgggcccuccuccccuccuugcaccgagauuaaucaaaggcucuuuucagagccaccaaaaaaaaaaaaaaaaaaaaaaaaaaaaaaaaaaaaaaaaaaaaaaaaaaaaaaaaaaaaaaaaaaaaaaaaaaaaaaaaaaaaaaaaaaaaaaaaaaaaa

SEQ ID NO: 10008 - RNA, 1860 nt, Artificial Sequence
  mRNA Design i-3 (hSL-A100) comprising derived and/or modified sequence from Pf(3D7)__XP_001351122.1__LumSynt_L(GGS4-GGG)_Pf-CSP(19-397) (opt2)
aggagaaagcuuaccaugcagaucuacgagggcaagcucaccgccgagggccuccgcuucggcaucgucgccucccgcuucaaccacgcccucgucgaccgccucgucgagggcgccaucgacgccaucguccgccacggcggccgcgaggaggacaucacccucguccgcguccccggcuccugggagauccccgucgccgccggcgagcucgcccgcaaggaggacaucgacgccgucaucgccaucggcguccucauccgcggcgccaccccccacuucgacuacaucgccuccgaggucuccaagggccucgccgaccucucccucgagcuccgcaagcccaucaccuucggcgucaucaccgccgacacccucgagcaggccaucgagcgcgccggcaccaagcacggcaacaagggcugggaggccgcccucuccgccaucgagauggccaaccucuucaagucccuccgcggcggcuccggcggcuccggcggcuccggcggcuccggcggcggccucuuccaggaguaccagugcuacggcuccuccuccaacacccgcguccucaacgagcucaacuacgacaacgccggcaccaaccucuacaacgagcucgagaugaacuacuacggcaagcaggagaacugguacucccucaagaagaacucccgcucccucggcgagaacgacgacggcaacaacgaggacaacgagaagcuccgcaagcccaagcacaagaagcucaagcagcccgccgacggcaaccccgaccccaacgccaaccccaacgucgaccccaacgccaaccccaacgucgaccccaacgccaaccccaacgucgaccccaacgccaaccccaacgccaaccccaacgccaaccccaacgccaaccccaacgccaaccccaacgccaaccccaacgccaaccccaacgccaaccccaacgccaaccccaacgccaaccccaacgccaaccccaacgccaaccccaacgccaaccccaacgccaaccccaacgccaaccccaacgccaaccccaacgccaaccccaacgucgaccccaacgccaaccccaacgccaaccccaacgccaaccccaacgccaaccccaacgccaaccccaacgccaaccccaacgccaaccccaacgccaaccccaacgccaaccccaacgccaaccccaacgccaaccccaacgccaaccccaacgccaaccccaacgccaaccccaacgccaaccccaacgccaaccccaacgccaaccccaacgccaaccccaacaagaacaaccagggcaacggccagggccacaacaugcccaacgaccccaaccgcaacgucgacgagaacgccaacgccaacuccgccgucaagaacaacaacaacgaggagcccuccgacaagcacaucaaggaguaccucaacaagauccagaacucccucuccaccgaguggucccccugcuccgucaccugcggcaacggcauccagguccgcaucaagcccggcuccgccaacaagcccaaggacgagcucgacuacgccaacgacaucgagaagaagaucugcaagauggagaagugcuccuccgucuucaacgucgucaacuccuccaucggccucaucaugguccucuccuuccucuuccucaacugaggacuaguuauaagacugacuagcccgaugggccucccaacgggcccuccuccccuccuugcaccgagauuaaucaaaggcucuuuucagagccaccaaaaaaaaaaaaaaaaaaaaaaaaaaaaaaaaaaaaaaaaaaaaaaaaaaaaaaaaaaaaaaaaaaaaaaaaaaaaaaaaaaaaaaaaaaaaaaaaaaaaa

SEQ ID NO: 10009 - RNA, 1722 nt, Artificial Sequence
  mRNA Design i-3 (hSL-A100) comprising derived and/or modified sequence from Pf(3D7)__XP_001351122.1__HsALB_Pf-CSP(19-272)_L(PVTN)_HBsAg (opt2)
aggagaaagcuuaccaugaagugggucaccuucaucucccuccucuuccucuucuccuccgccuacucccucuuccaggaguaccagugcuacggcuccuccuccaacacccgcguccucaacgagcucaacuacgacaacgccggcaccaaccucuacaacgagcucgagaugaacuacuacggcaagcaggagaacugguacucccucaagaagaacucccgcucccucggcgagaacgacgacggcaacaacgaggacaacgagaagcuccgcaagcccaagcacaagaagcucaagcagcccgccgacggcaaccccgaccccaacgccaaccccaacgucgaccccaacgccaaccccaacgucgaccccaacgccaaccccaacgucgaccccaacgccaaccccaacgccaaccccaacgccaaccccaacgccaaccccaacgccaaccccaacgccaaccccaacgccaaccccaacgccaaccccaacgccaaccccaacgccaaccccaacgccaaccccaacgccaaccccaacgccaaccccaacgccaaccccaacgccaaccccaacgccaaccccaacgccaaccccaacgucgaccccaacgccaaccccaacgccaaccccaacgccaaccccaacgccaaccccaacgccaaccccaacgccaaccccaacgccaaccccaacgccaaccccaacgccaaccccaacgccaaccccaacgccaaccccaacgccaaccccaacgccaaccccaacgccaaccccaacgccaaccccaacgccaaccccaacgccaaccccaacgccaacccccccgucaccaacauggagaacaucaccuccggcuuccucggcccccuccucguccuccaggccggcuucuuccuccucacccgcauccucaccaucccccagucccucgacuccugguggaccucccucaacuuccucggcggcucccccgucugccucggccagaacucccagucccccaccuccaaccacucccccaccuccugcccccccaucugccccggcuaccgcuggaugugccuccgccgcuucaucaucuuccucuucauccuccuccucugccucaucuuccuccucguccuccucgacuaccagggcaugcuccccgucugcccccucauccccggcuccaccaccaccaacaccggccccugcaagaccugcaccacccccgcccagggcaacuccauguuccccuccugcugcugcaccaagcccaccgacggcaacugcaccugcauccccauccccuccuccugggccuucgccaaguaccucugggagugggccuccguccgcuucuccuggcucucccuccucguccccuucguccagugguucgucggccucucccccaccgucuggcucuccgccaucuggaugaugugguacuggggccccucccucuacuccaucgucucccccuucaucccccuccuccccaucuucuucugccucugggucuacaucugaggacuaguuauaagacugacuagcccgaugggccucccaacgggcccuccuccccuccuugcaccgagauuaaucaaaggcucuuuucagagccaccaaaaaaaaaaaaaaaaaaaaaaaaaaaaaaaaaaaaaaaaaaaaaaaaaaaaaaaaaaaaaaaaaaaaaaaaaaaaaaaaaaaaaaaaaaaaaaaaaaaaa

SEQ ID NO: 10010 - RNA, 1839 nt, Artificial Sequence
  mRNA Design i-3 (hSL-A100) comprising derived and/or modified sequence from Pf(3D7)__XP_001351122.1__HsALB_Pf-CSP(19-272)_L(AAY)_Pf-CSP(346-3 65)_L(AAY)_PADRE_L(PVTN)_HBsAg (opt2)
aggagaaagcuuaccaugaagugggucaccuucaucucccuccucuuccucuucuccuccgccuacucccucuuccaggaguaccagugcuacggcuccuccuccaacacccgcguccucaacgagcucaacuacgacaacgccggcaccaaccucuacaacgagcucgagaugaacuacuacggcaagcaggagaacugguacucccucaagaagaacucccgcucccucggcgagaacgacgacggcaacaacgaggacaacgagaagcuccgcaagcccaagcacaagaagcucaagcagcccgccgacggcaaccccgaccccaacgccaaccccaacgucgaccccaacgccaaccccaacgucgaccccaacgccaaccccaacgucgaccccaacgccaaccccaacgccaaccccaacgccaaccccaacgccaaccccaacgccaaccccaacgccaaccccaacgccaaccccaacgccaaccccaacgccaaccccaacgccaaccccaacgccaaccccaacgccaaccccaacgccaaccccaacgccaaccccaacgccaaccccaacgccaaccccaacgccaaccccaacgucgaccccaacgccaaccccaacgccaaccccaacgccaaccccaacgccaaccccaacgccaaccccaacgccaaccccaacgccaaccccaacgccaaccccaacgccaaccccaacgccaaccccaacgccaaccccaacgccaaccccaacgccaaccccaacgccaaccccaacgccaaccccaacgccaaccccaacgccaaccccaacgccaaccccgccgccuacaucaagcccggcuccgccaacaagcccaaggacgagcucgacuacgccaacgacaucgaggccgccuacgccaaguucgucgccgccuggacccucaaggccgccgcccccgucaccaacauggagaacaucaccuccggcuuccucggcccccuccucguccuccaggccggcuucuuccuccucacccgcauccucaccaucccccagucccucgacuccugguggaccucccucaacuuccucggcggcucccccgucugccucggccagaacucccagucccccaccuccaaccacucccccaccuccugcccccccaucugccccggcuaccgcuggaugugccuccgccgcuucaucaucuuccucuucauccuccuccucugccucaucuuccuccucguccuccucgacuaccagggcaugcuccccgucugcccccucauccccggcuccaccaccaccaacaccggccccugcaagaccugcaccacccccgcccagggcaacuccauguuccccuccugcugcugcaccaagcccaccgacggcaacugcaccugcauccccauccccuccuccugggccuucgccaaguaccucugggagugggccuccguccgcuucuccuggcucucccuccucguccccuucguccagugguucgucggccucucccccaccgucuggcucuccgccaucuggaugaugugguacuggggccccucccucuacuccaucgucucccccuucaucccccuccuccccaucuucuucugccucugggucuacaucugaggacuaguuauaagacugacuagcccgaugggccucccaacgggcccuccuccccuccuugcaccgagauuaaucaaaggcucuuuucagagccaccaaaaaaaaaaaaaaaaaaaaaaaaaaaaaaaaaaaaaaaaaaaaaaaaaaaaaaaaaaaaaaaaaaaaaaaaaaaaaaaaaaaaaaaaaaaaaaaaaaaaa

SEQ ID NO: 10011 - RNA, 2058 nt, Artificial Sequence
  mRNA Design i-3 (hSL-A100) comprising derived and/or modified sequence from Pf(3D7)__XP_001351122.1__HsALB_Pf-CSP(19-384)_L(PVTN)_HBsAg (opt2)
aggagaaagcuuaccaugaagugggucaccuucaucucccuccucuuccucuucuccuccgccuacucccucuuccaggaguaccagugcuacggcuccuccuccaacacccgcguccucaacgagcucaacuacgacaacgccggcaccaaccucuacaacgagcucgagaugaacuacuacggcaagcaggagaacugguacucccucaagaagaacucccgcucccucggcgagaacgacgacggcaacaacgaggacaacgagaagcuccgcaagcccaagcacaagaagcucaagcagcccgccgacggcaaccccgaccccaacgccaaccccaacgucgaccccaacgccaaccccaacgucgaccccaacgccaaccccaacgucgaccccaacgccaaccccaacgccaaccccaacgccaaccccaacgccaaccccaacgccaaccccaacgccaaccccaacgccaaccccaacgccaaccccaacgccaaccccaacgccaaccccaacgccaaccccaacgccaaccccaacgccaaccccaacgccaaccccaacgccaaccccaacgccaaccccaacgccaaccccaacgucgaccccaacgccaaccccaacgccaaccccaacgccaaccccaacgccaaccccaacgccaaccccaacgccaaccccaacgccaaccccaacgccaaccccaacgccaaccccaacgccaaccccaacgccaaccccaacgccaaccccaacgccaaccccaacgccaaccccaacgccaaccccaacgccaaccccaacgccaaccccaacgccaaccccaacaagaacaaccagggcaacggccagggccacaacaugcccaacgaccccaaccgcaacgucgacgagaacgccaacgccaacuccgccgucaagaacaacaacaacgaggagcccuccgacaagcacaucaaggaguaccucaacaagauccagaacucccucuccaccgaguggucccccugcuccgucaccugcggcaacggcauccagguccgcaucaagcccggcuccgccaacaagcccaaggacgagcucgacuacgccaacgacaucgagaagaagaucugcaagauggagaagugcuccuccgucuucaacgucgucaacuccucccccgucaccaacauggagaacaucaccuccggcuuccucggcccccuccucguccuccaggccggcuucuuccuccucacccgcauccucaccaucccccagucccucgacuccugguggaccucccucaacuuccucggcggcucccccgucugccucggccagaacucccagucccccaccuccaaccacucccccaccuccugcccccccaucugccccggcuaccgcuggaugugccuccgccgcuucaucaucuuccucuucauccuccuccucugccucaucuuccuccucguccuccucgacuaccagggcaugcuccccgucugcccccucauccccggcuccaccaccaccaacaccggccccugcaagaccugcaccacccccgcccagggcaacuccauguuccccuccugcugcugcaccaagcccaccgacggcaacugcaccugcauccccauccccuccuccugggccuucgccaaguaccucugggagugggccuccguccgcuucuccuggcucucccuccucguccccuucguccagugguucgucggccucucccccaccgucuggcucuccgccaucuggaugaugugguacuggggccccucccucuacuccaucgucucccccuucaucccccuccuccccaucuucuucugccucugggucuacaucugaggacuaguuauaagacugacuagcccgaugggccucccaacgggcccuccuccccuccuugcaccgagauuaaucaaaggcucuuuucagagccaccaaaaaaaaaaaaaaaaaaaaaaaaaaaaaaaaaaaaaaaaaaaaaaaaaaaaaaaaaaaaaaaaaaaaaaaaaaaaaaaaaaaaaaaaaaaaaaaaaaaaa

SEQ ID NO: 10012 - RNA, 1875 nt, Artificial Sequence
  mRNA Design i-3 (hSL-A100) comprising derived and/or modified sequence from Pf(3D7)__XP_001351122.1__HsALB_Pf-CSP(19-384)_L(SGG)_Ferritin (opt2)
aggagaaagcuuaccaugaagugggucaccuucaucucccuccucuuccucuucuccuccgccuacucccucuuccaggaguaccagugcuacggcuccuccuccaacacccgcguccucaacgagcucaacuacgacaacgccggcaccaaccucuacaacgagcucgagaugaacuacuacggcaagcaggagaacugguacucccucaagaagaacucccgcucccucggcgagaacgacgacggcaacaacgaggacaacgagaagcuccgcaagcccaagcacaagaagcucaagcagcccgccgacggcaaccccgaccccaacgccaaccccaacgucgaccccaacgccaaccccaacgucgaccccaacgccaaccccaacgucgaccccaacgccaaccccaacgccaaccccaacgccaaccccaacgccaaccccaacgccaaccccaacgccaaccccaacgccaaccccaacgccaaccccaacgccaaccccaacgccaaccccaacgccaaccccaacgccaaccccaacgccaaccccaacgccaaccccaacgccaaccccaacgccaaccccaacgccaaccccaacgucgaccccaacgccaaccccaacgccaaccccaacgccaaccccaacgccaaccccaacgccaaccccaacgccaaccccaacgccaaccccaacgccaaccccaacgccaaccccaacgccaaccccaacgccaaccccaacgccaaccccaacgccaaccccaacgccaaccccaacgccaaccccaacgccaaccccaacgccaaccccaacgccaaccccaacaagaacaaccagggcaacggccagggccacaacaugcccaacgaccccaaccgcaacgucgacgagaacgccaacgccaacuccgccgucaagaacaacaacaacgaggagcccuccgacaagcacaucaaggaguaccucaacaagauccagaacucccucuccaccgaguggucccccugcuccgucaccugcggcaacggcauccagguccgcaucaagcccggcuccgccaacaagcccaaggacgagcucgacuacgccaacgacaucgagaagaagaucugcaagauggagaagugcuccuccgucuucaacgucgucaacuccuccuccggcggccucuccaaggacaucaucaagcuccucaacgagcaggucaacaaggagaugaacuccuccaaccucuacauguccauguccuccuggugcuacacccacucccucgacggcgccggccucuuccucuucgaccacgccgccgaggaguacgagcacgccaagaagcucaucaucuuccucaacgagaacaacguccccguccagcucaccuccaucuccgcccccgagcacaaguucgagggccucacccagaucuuccagaaggccuacgagcacgagcagcacaucuccgaguccaucaacaacaucgucgaccacgccaucaaguccaaggaccacgccaccuucaacuuccuccagugguacgucgccgagcagcacgaggaggagguccucuucaaggacauccucgacaagaucgagcucaucggcaacgagaaccacggccucuaccucgccgaccaguacgucaagggcaucgccaagucccgcaaguccugaggacuaguuauaagacugacuagcccgaugggccucccaacgggcccuccuccccuccuugcaccgagauuaaucaaaggcucuuuucagagccaccaaaaaaaaaaaaaaaaaaaaaaaaaaaaaaaaaaaaaaaaaaaaaaaaaaaaaaaaaaaaaaaaaaaaaaaaaaaaaaaaaaaaaaaaaaaaaaaaaaaaa

SEQ ID NO: 10013 - RNA, 1836 nt, Artificial Sequence
  mRNA Design i-3 (hSL-A100) comprising derived and/or modified sequence from Pf(3D7)__XP_001351122.1__HsALB_Pf-CSP(93-384)_L(PVTN)_HBsAg (opt2)
aggagaaagcuuaccaugaagugggucaccuucaucucccuccucuuccucuucuccuccgccuacuccaagcucaagcagcccgccgacggcaaccccgaccccaacgccaaccccaacgucgaccccaacgccaaccccaacgucgaccccaacgccaaccccaacgucgaccccaacgccaaccccaacgccaaccccaacgccaaccccaacgccaaccccaacgccaaccccaacgccaaccccaacgccaaccccaacgccaaccccaacgccaaccccaacgccaaccccaacgccaaccccaacgccaaccccaacgccaaccccaacgccaaccccaacgccaaccccaacgccaaccccaacgccaaccccaacgucgaccccaacgccaaccccaacgccaaccccaacgccaaccccaacgccaaccccaacgccaaccccaacgccaaccccaacgccaaccccaacgccaaccccaacgccaaccccaacgccaaccccaacgccaaccccaacgccaaccccaacgccaaccccaacgccaaccccaacgccaaccccaacgccaaccccaacgccaaccccaacgccaaccccaacaagaacaaccagggcaacggccagggccacaacaugcccaacgaccccaaccgcaacgucgacgagaacgccaacgccaacuccgccgucaagaacaacaacaacgaggagcccuccgacaagcacaucaaggaguaccucaacaagauccagaacucccucuccaccgaguggucccccugcuccgucaccugcggcaacggcauccagguccgcaucaagcccggcuccgccaacaagcccaaggacgagcucgacuacgccaacgacaucgagaagaagaucugcaagauggagaagugcuccuccgucuucaacgucgucaacuccucccccgucaccaacauggagaacaucaccuccggcuuccucggcccccuccucguccuccaggccggcuucuuccuccucacccgcauccucaccaucccccagucccucgacuccugguggaccucccucaacuuccucggcggcucccccgucugccucggccagaacucccagucccccaccuccaaccacucccccaccuccugcccccccaucugccccggcuaccgcuggaugugccuccgccgcuucaucaucuuccucuucauccuccuccucugccucaucuuccuccucguccuccucgacuaccagggcaugcuccccgucugcccccucauccccggcuccaccaccaccaacaccggccccugcaagaccugcaccacccccgcccagggcaacuccauguuccccuccugcugcugcaccaagcccaccgacggcaacugcaccugcauccccauccccuccuccugggccuucgccaaguaccucugggagugggccuccguccgcuucuccuggcucucccuccucguccccuucguccagugguucgucggccucucccccaccgucuggcucuccgccaucuggaugaugugguacuggggccccucccucuacuccaucgucucccccuucaucccccuccuccccaucuucuucugccucugggucuacaucugaggacuaguuauaagacugacuagcccgaugggccucccaacgggcccuccuccccuccuugcaccgagauuaaucaaaggcucuuuucagagccaccaaaaaaaaaaaaaaaaaaaaaaaaaaaaaaaaaaaaaaaaaaaaaaaaaaaaaaaaaaaaaaaaaaaaaaaaaaaaaaaaaaaaaaaaaaaaaaaaaaaaa

SEQ ID NO: 10014 - RNA, 1497 nt, Artificial Sequence; identical to SEQ ID NO: 8591
  mRNA Design i-3 (hSL-A100) comprising derived and/or modified sequence from Pf(3D7)__XP_001351122.1__HsALB_Pf-CSP(199-377)_L(PVTN)_HBsAg (opt2)

SEQ ID NO: 10015 - RNA, 1194 nt, Artificial Sequence
  mRNA Design i-3 (hSL-A100) comprising derived and/or modified sequence from Pf(3D7)__XP_001351122.1__HsALB_Pf-CSP(19-272)_L(AAY)_Pf-CSP(346-3 75)_L(AAY)_Pf-CSP(310-327) (opt2)
aggagaaagcuuaccaugaagugggucaccuucaucucccuccucuuccucuucuccuccgccuacucccucuuccaggaguaccagugcuacggcuccuccuccaacacccgcguccucaacgagcucaacuacgacaacgccggcaccaaccucuacaacgagcucgagaugaacuacuacggcaagcaggagaacugguacucccucaagaagaacucccgcucccucggcgagaacgacgacggcaacaacgaggacaacgagaagcuccgcaagcccaagcacaagaagcucaagcagcccgccgacggcaaccccgaccccaacgccaaccccaacgucgaccccaacgccaaccccaacgucgaccccaacgccaaccccaacgucgaccccaacgccaaccccaacgccaaccccaacgccaaccccaacgccaaccccaacgccaaccccaacgccaaccccaacgccaaccccaacgccaaccccaacgccaaccccaacgccaaccccaacgccaaccccaacgccaaccccaacgccaaccccaacgccaaccccaacgccaaccccaacgccaaccccaacgccaaccccaacgucgaccccaacgccaaccccaacgccaaccccaacgccaaccccaacgccaaccccaacgccaaccccaacgccaaccccaacgccaaccccaacgccaaccccaacgccaaccccaacgccaaccccaacgccaaccccaacgccaaccccaacgccaaccccaacgccaaccccaacgccaaccccaacgccaaccccaacgccaaccccaacgccaaccccgccgccuacaucaagcccggcuccgccaacaagcccaaggacgagcucgacuacgccaacgacaucgagaagaagaucugcaagauggagaagugcuccgccgccuacgagcccuccgacaagcacaucaaggaguaccucaacaagauccagaacucccucugaggacuaguuauaagacugacuagcccgaugggccucccaacgggcccuccuccccuccuugcaccgagauuaaucaaaggcucuuuucagagccaccaaaaaaaaaaaaaaaaaaaaaaaaaaaaaaaaaaaaaaaaaaaaaaaaaaaaaaaaaaaaaaaaaaaaaaaaaaaaaaaaaaaaaaaaaaaaaaaaaaaaa

SEQ ID NO: 10016 - RNA, 1242 nt, Artificial Sequence
  mRNA Design i-3 (hSL-A100) comprising derived and/or modified sequence from Pf(3D7)__XP_001351122.1__HsALB_Pf-CSP(19-272)_L(AAY)_Pf-CSP(346-3 75)_L(AAY)_Pf-CSP(310-327)_L(AAY)_PADRE (opt2)
aggagaaagcuuaccaugaagugggucaccuucaucucccuccucuuccucuucuccuccgccuacucccucuuccaggaguaccagugcuacggcuccuccuccaacacccgcguccucaacgagcucaacuacgacaacgccggcaccaaccucuacaacgagcucgagaugaacuacuacggcaagcaggagaacugguacucccucaagaagaacucccgcucccucggcgagaacgacgacggcaacaacgaggacaacgagaagcuccgcaagcccaagcacaagaagcucaagcagcccgccgacggcaaccccgaccccaacgccaaccccaacgucgaccccaacgccaaccccaacgucgaccccaacgccaaccccaacgucgaccccaacgccaaccccaacgccaaccccaacgccaaccccaacgccaaccccaacgccaaccccaacgccaaccccaacgccaaccccaacgccaaccccaacgccaaccccaacgccaaccccaacgccaaccccaacgccaaccccaacgccaaccccaacgccaaccccaacgccaaccccaacgccaaccccaacgccaaccccaacgucgaccccaacgccaaccccaacgccaaccccaacgccaaccccaacgccaaccccaacgccaaccccaacgccaaccccaacgccaaccccaacgccaaccccaacgccaaccccaacgccaaccccaacgccaaccccaacgccaaccccaacgccaaccccaacgccaaccccaacgccaaccccaacgccaaccccaacgccaaccccaacgccaaccccgccgccuacaucaagcccggcuccgccaacaagcccaaggacgagcucgacuacgccaacgacaucgagaagaagaucugcaagauggagaagugcuccgccgccuacgagcccuccgacaagcacaucaaggaguaccucaacaagauccagaacucccucgccgccuacgccaaguucgucgccgccuggacccucaaggccgccgccugaggacuaguuauaagacugacuagcccgaugggccucccaacgggcccuccuccccuccuugcaccgagauuaaucaaaggcucuuuucagagccaccaaaaaaaaaaaaaaaaaaaaaaaaaaaaaaaaaaaaaaaaaaaaaaaaaaaaaaaaaaaaaaaaaaaaaaaaaaaaaaaaaaaaaaaaaaaaaaaaaaaaa

SEQ ID NO: 10017 - RNA, 1242 nt, Artificial Sequence
  mRNA Design i-3 (hSL-A100) comprising derived and/or modified sequence from Pf(3D7)__XP_001351122.1__HsALB_Pf-CSP(19-272)_L(AAY)_Pf-CSP(310-3 27)_L(AAY)_Pf-CSP(346-375)_L(AAY)_PADRE (opt2)
aggagaaagcuuaccaugaagugggucaccuucaucucccuccucuuccucuucuccuccgccuacucccucuuccaggaguaccagugcuacggcuccuccuccaacacccgcguccucaacgagcucaacuacgacaacgccggcaccaaccucuacaacgagcucgagaugaacuacuacggcaagcaggagaacugguacucccucaagaagaacucccgcucccucggcgagaacgacgacggcaacaacgaggacaacgagaagcuccgcaagcccaagcacaagaagcucaagcagcccgccgacggcaaccccgaccccaacgccaaccccaacgucgaccccaacgccaaccccaacgucgaccccaacgccaaccccaacgucgaccccaacgccaaccccaacgccaaccccaacgccaaccccaacgccaaccccaacgccaaccccaacgccaaccccaacgccaaccccaacgccaaccccaacgccaaccccaacgccaaccccaacgccaaccccaacgccaaccccaacgccaaccccaacgccaaccccaacgccaaccccaacgccaaccccaacgccaaccccaacgucgaccccaacgccaaccccaacgccaaccccaacgccaaccccaacgccaaccccaacgccaaccccaacgccaaccccaacgccaaccccaacgccaaccccaacgccaaccccaacgccaaccccaacgccaaccccaacgccaaccccaacgccaaccccaacgccaaccccaacgccaaccccaacgccaaccccaacgccaaccccaacgccaaccccgccgccuacgagcccuccgacaagcacaucaaggaguaccucaacaagauccagaacucccucgccgccuacaucaagcccggcuccgccaacaagcccaaggacgagcucgacuacgccaacgacaucgagaagaagaucugcaagauggagaagugcuccgccgccuacgccaaguucgucgccgccuggacccucaaggccgccgccugaggacuaguuauaagacugacuagcccgaugggccucccaacgggcccuccuccccuccuugcaccgagauuaaucaaaggcucuuuucagagccaccaaaaaaaaaaaaaaaaaaaaaaaaaaaaaaaaaaaaaaaaaaaaaaaaaaaaaaaaaaaaaaaaaaaaaaaaaaaaaaaaaaaaaaaaaaaaaaaaaaaaa

SEQ ID NO: 10018 - RNA, 1296 nt, Artificial Sequence
  mRNA Design i-3 (hSL-A100) comprising derived and/or modified sequence from Pf(3D7)__XP_001351122.1__HsALB_Pf-CSP(19-272)_L(AAY)_Pf-CSP(310-3 27)_L(AAY)_Pf-CSP(346-375)_L(AAY)_PADRE_L(AAY)_P2 (opt2)
aggagaaagcuuaccaugaagugggucaccuucaucucccuccucuuccucuucuccuccgccuacucccucuuccaggaguaccagugcuacggcuccuccuccaacacccgcguccucaacgagcucaacuacgacaacgccggcaccaaccucuacaacgagcucgagaugaacuacuacggcaagcaggagaacugguacucccucaagaagaacucccgcucccucggcgagaacgacgacggcaacaacgaggacaacgagaagcuccgcaagcccaagcacaagaagcucaagcagcccgccgacggcaaccccgaccccaacgccaaccccaacgucgaccccaacgccaaccccaacgucgaccccaacgccaaccccaacgucgaccccaacgccaaccccaacgccaaccccaacgccaaccccaacgccaaccccaacgccaaccccaacgccaaccccaacgccaaccccaacgccaaccccaacgccaaccccaacgccaaccccaacgccaaccccaacgccaaccccaacgccaaccccaacgccaaccccaacgccaaccccaacgccaaccccaacgccaaccccaacgucgaccccaacgccaaccccaacgccaaccccaacgccaaccccaacgccaaccccaacgccaaccccaacgccaaccccaacgccaaccccaacgccaaccccaacgccaaccccaacgccaaccccaacgccaaccccaacgccaaccccaacgccaaccccaacgccaaccccaacgccaaccccaacgccaaccccaacgccaaccccaacgccaaccccgccgccuacgagcccuccgacaagcacaucaaggaguaccucaacaagauccagaacucccucgccgccuacaucaagcccggcuccgccaacaagcccaaggacgagcucgacuacgccaacgacaucgagaagaagaucugcaagauggagaagugcuccgccgccuacgccaaguucgucgccgccuggacccucaaggccgccgccgccgccuaccaguacaucaaggccaacuccaaguucaucggcaucaccgagcucugaggacuaguuauaagacugacuagcccgaugggccucccaacgggcccuccuccccuccuugcaccgagauuaaucaaaggcucuuuucagagccaccaaaaaaaaaaaaaaaaaaaaaaaaaaaaaaaaaaaaaaaaaaaaaaaaaaaaaaaaaaaaaaaaaaaaaaaaaaaaaaaaaaaaaaaaaaaaaaaaaaaaa

SEQ ID NO: 10019 - RNA, 1260 nt, Artificial Sequence
  mRNA Design i-3 (hSL-A100) comprising derived and/or modified sequence from Pf(3D7)__XP_001351122.1__HsALB_Pf-CSP(19-272)_L(AAY)_Pf-CSP(310-3 27)_Linker (AAY)_Pf-CSP(346-397) (opt2)
aggagaaagcuuaccaugaagugggucaccuucaucucccuccucuuccucuucuccuccgccuacucccucuuccaggaguaccagugcuacggcuccuccuccaacacccgcguccucaacgagcucaacuacgacaacgccggcaccaaccucuacaacgagcucgagaugaacuacuacggcaagcaggagaacugguacucccucaagaagaacucccgcucccucggcgagaacgacgacggcaacaacgaggacaacgagaagcuccgcaagcccaagcacaagaagcucaagcagcccgccgacggcaaccccgaccccaacgccaaccccaacgucgaccccaacgccaaccccaacgucgaccccaacgccaaccccaacgucgaccccaacgccaaccccaacgccaaccccaacgccaaccccaacgccaaccccaacgccaaccccaacgccaaccccaacgccaaccccaacgccaaccccaacgccaaccccaacgccaaccccaacgccaaccccaacgccaaccccaacgccaaccccaacgccaaccccaacgccaaccccaacgccaaccccaacgccaaccccaacgucgaccccaacgccaaccccaacgccaaccccaacgccaaccccaacgccaaccccaacgccaaccccaacgccaaccccaacgccaaccccaacgccaaccccaacgccaaccccaacgccaaccccaacgccaaccccaacgccaaccccaacgccaaccccaacgccaaccccaacgccaaccccaacgccaaccccaacgccaaccccaacgccaaccccgccgccuacgagcccuccgacaagcacaucaaggaguaccucaacaagauccagaacucccucgccgccuacaucaagcccggcuccgccaacaagcccaaggacgagcucgacuacgccaacgacaucgagaagaagaucugcaagauggagaagugcuccuccgucuucaacgucgucaacuccuccaucggccucaucaugguccucuccuuccucuuccucaacugaggacuaguuauaagacugacuagcccgaugggccucccaacgggcccuccuccccuccuugcaccgagauuaaucaaaggcucuuuucagagccaccaaaaaaaaaaaaaaaaaaaaaaaaaaaaaaaaaaaaaaaaaaaaaaaaaaaaaaaaaaaaaaaaaaaaaaaaaaaaaaaaaaaaaaaaaaaaaaaaaaaaa

SEQ ID NO: 10020 - RNA, 1860 nt, Artificial Sequence
  mRNA Design i-3 (hSL-A100) comprising derived and/or modified sequence from Pf(3D7)__XP_001351122.1__LumSynt_L(GGS4-GGG)_Pf-CSP(19-397) (opt3)
aggagaaagcuuaccaugcagaucuacgagggcaagcugaccgccgaagggcucagauucggaauuguggcuagcagguuuaaccacgcacuugucgaccggcugguugagggugccauagaugcgaucgugcgccauggcgggcgagaagaggacauuacauugguacgugugcccggauccugggaaaucccugucgcugccggcgaguuagcaagaaaagaggauauugacgccgugaucgcuauagguguucugaucaggggagcaacuccacacuucgauuauauugccucugaagugucaaaggggcuagcugaccucagucuggagcuucggaaaccgaucacguuuggcgucauuaccgccgauacacuggaacaagcgaucgagcgcgcaggcacuaagcaugggaauaaaggaugggaggccgcuuugagcgccauagaaauggcaaaccucuucaagucccugagagguggcucugggggaucgggcgguucagggggaagcggcggcgggcuguuucaggaguaccagugcuauggaaguuccucuaauaccagggugcucaacgaauuaaauuacgacaacgcugguacaaaucuguauaacgagcuugaaaugaauuacuauggcaagcaggagaacugguacagcuugaaaaagaacucccggucacugggggagaaugaugacggaaauaacgaagauaaugagaaacuacgcaagcccaaacacaagaagcucaaacaaccugccgacggcaacccagaucccaacgcgaauccuaacguagacccaaaugccaaccccaauguugacccuaacgcaaauccaaacguggauccgaaugcuaaccccaaugccaacccuaaugcuaacccaaaugccaaccccaacgcaaauccuaacgccaauccaaacgcuaaucccaacgcgaauccgaacgcaaauccuaacgccaaucccaacgcuaauccaaacgccaauccuaacgcaaaccccaaugccaacccaaaugcuaaccccaaugccaacccuaaugcaaacccaaaugucgacccgaacgcgaaucccaacgcuaauccuaacgccaauccaaacgcaaaccccaaugccaacccuaaugcuaacccaaaugccaaccccaaugcaaacccgaaugcuaacccuaaugccaacccaaaugcgaaccccaaugccaacccuaaugcuaaccccaacgcaaauccaaacgccaauccuaacgcuaaucccaacgccaauccaaacgcaaauccgaacaagaauaaccaggguaaugggcagggccauaacaugccuaaugaucccaaccgaaacguggacgaaaaugcgaacgccaauagugcugugaaaaacaauaacaaugaggaaccaagcgauaagcacauuaaagaguaccugaacaagauccaaaauucucuuuccaccgaguggucacccugcagcgucacuugcggaaacggcauucagguuagaaucaaaccugggagugccaauaagccaaaggacgaacuggauuaugcaaacgacaucgagaaaaagauuuguaaaauggaaaaguguucuuccguguucaauguagugaacagcucgauaggauugaucaugguccucucuuuucuguucuuaaauugaggacuaguuauaagacugacuagcccgaugggccucccaacgggcccuccuccccuccuugcaccgagauuaaucaaaggcucuuuucagagccaccaaaaaaaaaaaaaaaaaaaaaaaaaaaaaaaaaaaaaaaaaaaaaaaaaaaaaaaaaaaaaaaaaaaaaaaaaaaaaaaaaaaaaaaaaaaaaaaaaaaaa

SEQ ID NO: 10021 - RNA, 1722 nt, Artificial Sequence
  mRNA Design i-3 (hSL-A100) comprising derived and/or modified sequence from Pf(3D7)__XP_001351122.1__HsALB_Pf-CSP(19-272)_L(PVTN)_HBsAg (opt3)
aggagaaagcuuaccaugaagugggugaccuucaucagccugcucuuucuuuucuccucugccuacucacuguuucaggaguaucaaugcuacggcaguagcuccaacacaagagucuugaaugaauuaaacuaugacaaugcugggacuaaccuguacaaugagcuagaaaugaacuauuacggaaaacaggagaauugguauucucucaagaaaaacucgaggucacugggugaaaaugaugacggcaacaaugaggauaacgagaaacuucggaagcccaagcacaagaaacugaagcagccugcagacgggaauccagauccgaacgccaaucccaacguugacccuaacgcgaauccaaacguggaucccaaugcuaacccuaauguagacccaaacgccaaucccaacgcaaauccuaacgccaauccaaacgcuaauccgaacgcaaaucccaacgccaacccuaaugcuaacccaaaugccaaccccaaugcgaacccuaaugcaaacccaaaugccaaccccaaugcuaacccgaaugccaacccuaaugcaaaccccaacgcuaauccaaacgccaauccuaacgcgaaucccaacguggauccaaaugccaaccccaaugcaaacccuaaugcuaacccaaaugccaacccgaaugcuaaccccaacgccaauccuaacgcaaauccaaacgccaaucccaacgcuaauccuaacgcgaauccaaacgcaaaucccaacgccaauccgaacgcuaauccuaacgccaauccaaacgcaaaccccaaugccaacccuaaugcuaaccccaaugccaacccaccugucacgaauauggaaaacauuaccagcggauucuugggcccccuccuggugcugcaggcaggguuuuuccucuuaacacgcauacugacuaucccacaaagucuugacuccugguggaccucuuugaauuuucuggguggaagcccgguuugucuaggccagaacucccagucaccuacaaguaaucauagccccaccucuugcccacccauuuguccuggcuaccgauggaugugccuccguagauucaucauuuuucuguucauccuucuguugugucucauauuucuguuagugcugcucgauuaccaggggaugcuuccagucugcccccugaucccuggauccacuacaaccaacacggguccguguaaaacuugcaccacaccagcgcaaggcaauucaauguuccccagcuguugcuguacuaagccuaccgacgggaacugcacaugcauuccaauccccaguucuugggcuuuugccaaauauuugugggagugggcauccgugagguucagcuggcuaucgcugcucguaccuuucguucagugguuugugggacugucuccgaccgucuggcuuuccgccauuuggaugaugugguacuggggccccucacuguauaguaucgugagcccauucauaccuuugcuccccaucuuuuucugucuguggguguacauuugaggacuaguuauaagacugacuagcccgaugggccucccaacgggcccuccuccccuccuugcaccgagauuaaucaaaggcucuuuucagagccaccaaaaaaaaaaaaaaaaaaaaaaaaaaaaaaaaaaaaaaaaaaaaaaaaaaaaaaaaaaaaaaaaaaaaaaaaaaaaaaaaaaaaaaaaaaaaaaaaaaaaa

SEQ ID NO: 10022 - RNA, 1839 nt, Artificial Sequence
  mRNA Design i-3 (hSL-A100) comprising derived and/or modified sequence from Pf(3D7)__XP_001351122.1__HsALB_Pf-CSP(19-272)_L(AAY)_Pf-CSP(346-3 65)_L(AAY)_PADRE_L(PVTN)_HBsAg (opt3)
aggagaaagcuuaccaugaagugggugaccuucaucagccugcucuuucuuuucuccucugccuacucacuguuucaggaguaucaaugcuacggcaguagcuccaacacaagagucuugaaugaauuaaacuaugacaaugcugggacuaaccuguacaaugagcuagaaaugaacuauuacggaaaacaggagaauugguauucucucaagaaaaacucgaggucacugggugaaaaugaugacggcaacaaugaggauaacgagaaacuucggaagcccaagcacaagaaacugaagcagccugcagacgggaauccagauccgaacgccaaucccaacguugacccuaacgcgaauccaaacguggaucccaaugcuaacccuaauguagacccaaacgccaaucccaacgcaaauccuaacgccaauccaaacgcuaauccgaacgcaaaucccaacgccaacccuaaugcuaacccaaaugccaaccccaaugcgaacccuaaugcaaacccaaaugccaaccccaaugcuaacccgaaugccaacccuaaugcaaaccccaacgcuaauccaaacgccaauccuaacgcgaaucccaacguggauccaaaugccaaccccaaugcaaacccuaaugcuaacccaaaugccaacccgaaugcuaaccccaacgccaauccuaacgcaaauccaaacgccaaucccaacgcuaauccuaacgcgaauccaaacgcaaaucccaacgccaauccgaacgcuaauccuaacgccaauccaaacgcaaaccccaaugccaacccuaaugcuaaccccaaugccaacccagcagcguacauuaaaccuggaagcgcuaauaagcccaaagacgaauuggauuacgccaacgacauagaggcagccuaugcuaaguucgucgccgcauggacgcucaaggcugccgcgccagugaccaauauggaaaacaucacaaguggcuuucuggguccgcugcucguuuuacaggccggguucuuucugcuuacucgcauuuugaccaucccucaaucccuggauucuugguggacaagccuaaauuuccucggaggcucccccgugugucugggccagaacucacagaguccaaccagcaaucauucucccacuuccugcccuccaauuugucccggguaccgauggaugugccuucguagauuuaucauauuccuguuuaucuugcuccuguguuuaauuuuccugcucguccuucuggacuaucagggaauguugccugugugcccgcuaaucccagguucaacaaccacgaacacuggccccuguaaaaccugcacaacuccugcucaagggaauagcauguuuccaaguuguugcuguaccaagcccacagacggaaacuguaccugcauuccuaucccgucuuccugggcauucgccaaauaccugugggagugggcuagcguaagguucucguggcucucucugcuuguucccuuugugcagugguucgucggccuguccccaacggugugguugucagccauauggaugaugugguauugggguccuagucucuacagcauugugucccccuuuaucccacuguuaccuauuuucuuuugccugugggucuauaucugaggacuaguuauaagacugacuagcccgaugggccucccaacgggcccuccuccccuccuugcaccgagauuaaucaaaggcucuuuucagagccaccaaaaaaaaaaaaaaaaaaaaaaaaaaaaaaaaaaaaaaaaaaaaaaaaaaaaaaaaaaaaaaaaaaaaaaaaaaaaaaaaaaaaaaaaaaaaaaaaaaaaa

SEQ ID NO: 10023 - RNA, 2058 nt, Artificial Sequence
  mRNA Design i-3 (hSL-A100) comprising derived and/or modified sequence from Pf(3D7)__XP_001351122.1__HsALB_Pf-CSP(19-384)_L(PVTN)_HBsAg (opt3)
aggagaaagcuuaccaugaagugggugaccuucaucagccugcucuuucuuuucuccucugccuacucacuguuucaggaguaucaaugcuacggcaguagcuccaacacaagagucuugaaugaauuaaacuaugacaaugcugggacuaaccuguacaaugagcuagaaaugaacuauuacggaaaacaggagaauugguauucucucaagaaaaacucgaggucacugggugaaaaugaugacggcaacaaugaggauaacgagaaacuucggaagcccaagcacaagaaacugaagcagccugcagacgggaauccagauccgaacgccaaucccaacguugacccuaacgcgaauccaaacguggaucccaaugcuaacccuaauguagacccaaacgccaaucccaacgcaaauccuaacgccaauccaaacgcuaauccgaacgcaaaucccaacgccaacccuaaugcuaacccaaaugccaaccccaaugcgaacccuaaugcaaacccaaaugccaaccccaaugcuaacccgaaugccaacccuaaugcaaaccccaacgcuaauccaaacgccaauccuaacgcgaaucccaacguggauccaaaugccaaccccaaugcaaacccuaaugcuaacccaaaugccaacccgaaugcuaaccccaacgccaauccuaacgcaaauccaaacgccaaucccaacgcuaauccuaacgcgaauccaaacgcaaaucccaacgccaauccgaacgcuaauccuaacgccaauccaaacgcaaaccccaaugccaacccuaaugcuaaccccaaugccaacccaaauaaaaacaaucagggaaacggccaaggucauaauaugccuaacgaccccaaucgcaacgucgaugaaaaugcaaacgcgaacagcgcugugaagaauaacaauaacgaggaaccaagugacaaacacauuaaggaguacuugaauaagauacagaacucccucucuacggaguggagcccguguuccguuaccugcgggaauggaauccaggugcgaauuaaaccuggcucagccaacaagcccaaagaugaacuggacuacgcaaaugacaucgagaagaaaauuuguaagauggaaaaaugcaguagcgucuucaacgugguaaauucuuccccaguuacaaacauggagaauaucacuucaggcuuucuggggccccucuuagugcugcaggccggauucuuucuuuugacccguauacugacaaucccucaaagccuagauaguugguggaccucucucaacuuccuggguggcuccccagucugucuugggcagaauagccagucgcccacuucuaaccauuccccuacaucaugcccgccaauuugucccggauauagauggaugugccugaggcgguuuaucauuuucuuguuuauccuccuguuaugucugauauuccuccuugugcuguuggacuaccagggcaugcuaccugugugcccacugauucccgguaguaccacgacuaacaccgggccuuguaagacaugcacuaccccggcucaaggaaauagcauguuucccuccugcuguugcacaaagccaaccgauggcaacuguacgugcaucccuauucccucuagcugggccuucgcaaaauaucucugggaaugggcuucaguccgcuucaguuggcugucccuucugguuccauuugugcagugguucguaggcuugagcccuacuguguggcucucugccaucuggaugaugugguacugggggcccucacuguauaguaucgucagcccauuuauuccguuacugccuauauucuuuugucuauggguguacaucugaggacuaguuauaagacugacuagcccgaugggccucccaacgggcccuccuccccuccuugcaccgagauuaaucaaaggcucuuuucagagccaccaaaaaaaaaaaaaaaaaaaaaaaaaaaaaaaaaaaaaaaaaaaaaaaaaaaaaaaaaaaaaaaaaaaaaaaaaaaaaaaaaaaaaaaaaaaaaaaaaaaaa

SEQ ID NO: 10024 - RNA, 1875 nt, Artificial Sequence
  mRNA Design i-3 (hSL-A100) comprising derived and/or modified sequence from Pf(3D7)__XP_001351122.1__HsALB_Pf-CSP(19-384)_L(SGG)_Ferritin (opt3)
aggagaaagcuuaccaugaagugggugaccuucaucagccugcucuuucuuuucuccucugccuacucacuguuucaggaguaucaaugcuacggcaguagcuccaacacaagagucuugaaugaauuaaacuaugacaaugcugggacuaaccuguacaaugagcuagaaaugaacuauuacggaaaacaggagaauugguauucucucaagaaaaacucgaggucacugggugaaaaugaugacggcaacaaugaggauaacgagaaacuucggaagcccaagcacaagaaacugaagcagccugcagacgggaauccagauccgaacgccaaucccaacguugacccuaacgcgaauccaaacguggaucccaaugcuaacccuaauguagacccaaacgccaaucccaacgcaaauccuaacgccaauccaaacgcuaauccgaacgcaaaucccaacgccaacccuaaugcuaacccaaaugccaaccccaaugcgaacccuaaugcaaacccaaaugccaaccccaaugcuaacccgaaugccaacccuaaugcaaaccccaacgcuaauccaaacgccaauccuaacgcgaaucccaacguggauccaaaugccaaccccaaugcaaacccuaaugcuaacccaaaugccaacccgaaugcuaaccccaacgccaauccuaacgcaaauccaaacgccaaucccaacgcuaauccuaacgcgaauccaaacgcaaaucccaacgccaauccgaacgcuaauccuaacgccaauccaaacgcaaaccccaaugccaacccuaaugcuaaccccaaugccaacccaaauaaaaacaaucagggaaacggccaaggucauaauaugccuaacgaccccaaucgcaacgucgaugaaaaugcaaacgcgaacagcgcugugaagaauaacaauaacgaggaaccaagugacaaacacauuaaggaguacuugaauaagauacagaacucccucucuacggaguggagcccguguuccguuaccugcgggaauggaauccaggugcgaauuaaaccuggcucagccaacaagcccaaagaugaacuggacuacgcaaaugacaucgagaagaaaauuuguaagauggaaaaaugcaguagcgucuucaacgugguaaauucuuccucaggcgggcugagcaaggauaucauaaagcucuuaaacgagcagguuaauaaagaaaugaacaguucuaaucuguauauguccaugagcucgugguguuacacacauucucuugacggagccgguuuguuucuguucgaucacgcugccgaggaguaugaacaugcaaagaaacuaaucauuuuucucaacgagaacaaugugccaguccaacugacuuccaucucagcucccgaacacaaguucgagggccuuacccagauuuuucagaaagccuacgaacacgagcagcauaucagugagagcauaaacaauauuguggaccacgcgaucaaguccaaggaucaugccacauucaacuuucugcaaugguauguggcugaacagcacgaggaagaggucuuguucaaagacauucucgauaagaucgaacugaucgggaaugagaaccacggauuauaccuggcagaccaguauguuaaaggcauugccaagucucguaaaagcugaggacuaguuauaagacugacuagcccgaugggccucccaacgggcccuccuccccuccuugcaccgagauuaaucaaaggcucuuuucagagccaccaaaaaaaaaaaaaaaaaaaaaaaaaaaaaaaaaaaaaaaaaaaaaaaaaaaaaaaaaaaaaaaaaaaaaaaaaaaaaaaaaaaaaaaaaaaaaaaaaaaaa

SEQ ID NO: 10025 - RNA, 1836 nt, Artificial Sequence
  mRNA Design i-3 (hSL-A100) comprising derived and/or modified sequence from Pf(3D7)__XP_001351122.1__HsALB_Pf-CSP(93-384)_L(PVTN)_HBsAg (opt3)
aggagaaagcuuaccaugaagugggugaccuucaucagccugcucuuucuuuucuccucugccuacucaaaacugaagcagcccgcugacggcaacccugauccaaaugcaaacccgaaugucgaccccaacgccaauccuaacguugauccaaaugcgaaccccaauguggacccuaacgcuaauccaaacgccaaucccaacgcaaauccuaacgccaacccaaaugcuaacccgaaugcaaaccccaaugccaacccuaaugcuaacccaaaugccaaccccaaugcgaacccuaaugcaaacccaaaugccaaccccaacgcuaauccgaacgccaauccuaacgcaaaucccaacgcuaauccaaacgccaauccuaacguagaucccaaugcgaacccaaaugccaaccccaaugcaaacccuaacgcuaauccaaacgccaauccgaacgcuaaucccaacgccaauccuaacgcaaauccaaacgccaaucccaacgcuaauccuaacgcgaauccaaacgcaaaccccaaugccaacccgaaugcuaacccuaaugccaacccaaaugcaaaccccaaugccaacccuaaugcuaaccccaauaaaaacaaucaagggaacggacagggucacaauaugccaaacgacccuaacagaaauguggaugagaacgccaaugcaaacagugcggucaagaauaacaauaacgaggaacccagcgacaaacauauuaaggaauauuugaauaagauacagaacuccuuaucuacagaguggucgccaugcucagugacuuguggcaaugggauccagguuaggauuaaaccgggaagcgcuaacaagccuaaagaugaacuggacuacgccaaugauaucgagaagaaaauuugcaagauggagaaguguaguuccguguuuaacgucguaaauucuagccccgugacgaacauggaaaacaucaccuccggcuuccuagguccacuccugguucuucaagcaggguuuuuccuguugacacggauacucacuaucccccagucacuggacaguugguggaccagccugaauuuucucggaggcucuccugugugcuuaggccagaacucccagucaccaacaagcaaucacagucccaccucuuguccuccgauuugcccaggguaucgcuggaugugucugcgacguuucaucauuuuucuuuucaucuugcugcuaugccucauauuucugcuuguccuguuggauuaccaaggaaugcuccccguguguccucugauuccagguuccacuacaaccaacacgggccccugcaaaacuuguaccacuccugcccaggggaauagcauguucccgucgugcugcuguacaaagcccaccgacggaaacugcacauguaucccaauuccuucuuccugggcuuuugccaaauauuuaugggagugggcaucagugagauucaguuggcugagccuccuuguccccuucguucagugguuugugggccuguccccaaccguaugguugucugcuaucuggaugaugugguacugggguccuagccuauauucaaucgugagucccuucauuccacugcucccgauauuuuucugccugugggucuacaucugaggacuaguuauaagacugacuagcccgaugggccucccaacgggcccuccuccccuccuugcaccgagauuaaucaaaggcucuuuucagagccaccaaaaaaaaaaaaaaaaaaaaaaaaaaaaaaaaaaaaaaaaaaaaaaaaaaaaaaaaaaaaaaaaaaaaaaaaaaaaaaaaaaaaaaaaaaaaaaaaaaaaa

SEQ ID NO: 10026 - RNA, 1497 nt, Artificial Sequence; identical to SEQ ID NO: 8621
  mRNA Design i-3 (hSL-A100) comprising derived and/or modified sequence from Pf(3D7)__XP_001351122.1__HsALB_Pf-CSP(199-377)_L(PVTN)_HBsAg (opt3)

SEQ ID NO: 10027 - RNA, 1194 nt, Artificial Sequence
  mRNA Design i-3 (hSL-A100) comprising derived and/or modified sequence from Pf(3D7)__XP_001351122.1__HsALB_Pf-CSP(19-272)_L(AAY)_Pf-CSP(346-3 75)_L(AAY)_Pf-CSP(310-327) (opt3)
aggagaaagcuuaccaugaagugggugaccuucaucagccugcucuuucuuuucuccucugccuacucacuguuucaggaguaucaaugcuacggcaguagcuccaacacaagagucuugaaugaauuaaacuaugacaaugcugggacuaaccuguacaaugagcuagaaaugaacuauuacggaaaacaggagaauugguauucucucaagaaaaacucgaggucacugggugaaaaugaugacggcaacaaugaggauaacgagaaacuucggaagcccaagcacaagaaacugaagcagccugcagacgggaauccagauccgaacgccaaucccaacguugacccuaacgcgaauccaaacguggaucccaaugcuaacccuaauguagacccaaacgccaaucccaacgcaaauccuaacgccaauccaaacgcuaauccgaacgcaaaucccaacgccaacccuaaugcuaacccaaaugccaaccccaaugcgaacccuaaugcaaacccaaaugccaaccccaaugcuaacccgaaugccaacccuaaugcaaaccccaacgcuaauccaaacgccaauccuaacgcgaaucccaacguggauccaaaugccaaccccaaugcaaacccuaaugcuaacccaaaugccaacccgaaugcuaaccccaacgccaauccuaacgcaaauccaaacgccaaucccaacgcuaauccuaacgcgaauccaaacgcaaaucccaacgccaauccgaacgcuaauccuaacgccaauccaaacgcaaaccccaaugccaacccuaaugcuaaccccaaugccaacccagcagcguacauuaaaccuggaagcgcuaauaagcccaaagacgaauuggauuacgccaacgacauagagaagaagaucuguaaaauggaaaagugcagugcagccuaugagccauccgauaaacauauuaaggaguaccucaauaaaauccagaacucucugugaggacuaguuauaagacugacuagcccgaugggccucccaacgggcccuccuccccuccuugcaccgagauuaaucaaaggcucuuuucagagccaccaaaaaaaaaaaaaaaaaaaaaaaaaaaaaaaaaaaaaaaaaaaaaaaaaaaaaaaaaaaaaaaaaaaaaaaaaaaaaaaaaaaaaaaaaaaaaaaaaaaaa

SEQ ID NO: 10028 - RNA, 1242 nt, Artificial Sequence
  mRNA Design i-3 (hSL-A100) comprising derived and/or modified sequence from Pf(3D7)__XP_001351122.1__HsALB_Pf-CSP(19-272)_L(AAY)_Pf-CSP(346-3 75)_L(AAY)_Pf-CSP(310-327)_L(AAY)_PADRE (opt3)
aggagaaagcuuaccaugaagugggugaccuucaucagccugcucuuucuuuucuccucugccuacucacuguuucaggaguaucaaugcuacggcaguagcuccaacacaagagucuugaaugaauuaaacuaugacaaugcugggacuaaccuguacaaugagcuagaaaugaacuauuacggaaaacaggagaauugguauucucucaagaaaaacucgaggucacugggugaaaaugaugacggcaacaaugaggauaacgagaaacuucggaagcccaagcacaagaaacugaagcagccugcagacgggaauccagauccgaacgccaaucccaacguugacccuaacgcgaauccaaacguggaucccaaugcuaacccuaauguagacccaaacgccaaucccaacgcaaauccuaacgccaauccaaacgcuaauccgaacgcaaaucccaacgccaacccuaaugcuaacccaaaugccaaccccaaugcgaacccuaaugcaaacccaaaugccaaccccaaugcuaacccgaaugccaacccuaaugcaaaccccaacgcuaauccaaacgccaauccuaacgcgaaucccaacguggauccaaaugccaaccccaaugcaaacccuaaugcuaacccaaaugccaacccgaaugcuaaccccaacgccaauccuaacgcaaauccaaacgccaaucccaacgcuaauccuaacgcgaauccaaacgcaaaucccaacgccaauccgaacgcuaauccuaacgccaauccaaacgcaaaccccaaugccaacccuaaugcuaaccccaaugccaacccagcagcguacauuaaaccuggaagcgcuaauaagcccaaagacgaauuggauuacgccaacgacauagagaagaagaucuguaaaauggaaaagugcagugcagccuaugagccauccgauaaacauauuaaggaguaccucaauaaaauccagaacucucuggcugccuaugcaaaguucgucgcugccuggacgcugaaagcggccgcuugaggacuaguuauaagacugacuagcccgaugggccucccaacgggcccuccuccccuccuugcaccgagauuaaucaaaggcucuuuucagagccaccaaaaaaaaaaaaaaaaaaaaaaaaaaaaaaaaaaaaaaaaaaaaaaaaaaaaaaaaaaaaaaaaaaaaaaaaaaaaaaaaaaaaaaaaaaaaaaaaaaaaa

SEQ ID NO: 10029 - RNA, 1242 nt, Artificial Sequence
  mRNA Design i-3 (hSL-A100) comprising derived and/or modified sequence from Pf(3D7)__XP_001351122.1__HsALB_Pf-CSP(19-272)_L(AAY)_Pf-CSP(310-3 27)_L(AAY)_Pf-CSP(346-375)_L(AAY)_PADRE (opt3)
aggagaaagcuuaccaugaagugggugaccuucaucagccugcucuuucuuuucuccucugccuacucacuguuucaggaguaucaaugcuacggcaguagcuccaacacaagagucuugaaugaauuaaacuaugacaaugcugggacuaaccuguacaaugagcuagaaaugaacuauuacggaaaacaggagaauugguauucucucaagaaaaacucgaggucacugggugaaaaugaugacggcaacaaugaggauaacgagaaacuucggaagcccaagcacaagaaacugaagcagccugcagacgggaauccagauccgaacgccaaucccaacguugacccuaacgcgaauccaaacguggaucccaaugcuaacccuaauguagacccaaacgccaaucccaacgcaaauccuaacgccaauccaaacgcuaauccgaacgcaaaucccaacgccaacccuaaugcuaacccaaaugccaaccccaaugcgaacccuaaugcaaacccaaaugccaaccccaaugcuaacccgaaugccaacccuaaugcaaaccccaacgcuaauccaaacgccaauccuaacgcgaaucccaacguggauccaaaugccaaccccaaugcaaacccuaaugcuaacccaaaugccaacccgaaugcuaaccccaacgccaauccuaacgcaaauccaaacgccaaucccaacgcuaauccuaacgcgaauccaaacgcaaaucccaacgccaauccgaacgcuaauccuaacgccaauccaaacgcaaaccccaaugccaacccuaaugcuaaccccaaugccaacccagcagcguacgaaccuagcgacaaacauauuaaggaguacuugaauaaaauacagaacagucucgcugccuauaucaagcccggauccgcaaauaagccaaaagaugaacuggacuacgccaacgauauugagaagaaaaucuguaagauggagaaaugcucugcugccuaugcaaaguucgucgcugccuggacgcugaaagcggccgcuugaggacuaguuauaagacugacuagcccgaugggccucccaacgggcccuccuccccuccuugcaccgagauuaaucaaaggcucuuuucagagccaccaaaaaaaaaaaaaaaaaaaaaaaaaaaaaaaaaaaaaaaaaaaaaaaaaaaaaaaaaaaaaaaaaaaaaaaaaaaaaaaaaaaaaaaaaaaaaaaaaaaaa

SEQ ID NO: 10030 - RNA, 1296 nt, Artificial Sequence
  mRNA Design i-3 (hSL-A100) comprising derived and/or modified sequence from Pf(3D7)__XP_001351122.1__HsALB_Pf-CSP(19-272)_L(AAY)_Pf-CSP(310-3 27)_L(AAY)_Pf-CSP(346-375)_L(AAY)_PADRE_L(AAY)_P2 (opt3)
aggagaaagcuuaccaugaagugggugaccuucaucagccugcucuuucuuuucuccucugccuacucacuguuucaggaguaucaaugcuacggcaguagcuccaacacaagagucuugaaugaauuaaacuaugacaaugcugggacuaaccuguacaaugagcuagaaaugaacuauuacggaaaacaggagaauugguauucucucaagaaaaacucgaggucacugggugaaaaugaugacggcaacaaugaggauaacgagaaacuucggaagcccaagcacaagaaacugaagcagccugcagacgggaauccagauccgaacgccaaucccaacguugacccuaacgcgaauccaaacguggaucccaaugcuaacccuaauguagacccaaacgccaaucccaacgcaaauccuaacgccaauccaaacgcuaauccgaacgcaaaucccaacgccaacccuaaugcuaacccaaaugccaaccccaaugcgaacccuaaugcaaacccaaaugccaaccccaaugcuaacccgaaugccaacccuaaugcaaaccccaacgcuaauccaaacgccaauccuaacgcgaaucccaacguggauccaaaugccaaccccaaugcaaacccuaaugcuaacccaaaugccaacccgaaugcuaaccccaacgccaauccuaacgcaaauccaaacgccaaucccaacgcuaauccuaacgcgaauccaaacgcaaaucccaacgccaauccgaacgcuaauccuaacgccaauccaaacgcaaaccccaaugccaacccuaaugcuaaccccaaugccaacccagcagcguacgaaccuagcgacaaacauauuaaggaguacuugaauaaaauacagaacagucucgcugccuauaucaagcccggauccgcaaauaagccaaaagaugaacuggacuacgccaacgauauugagaagaaaaucuguaagauggagaaaugcucugcugccuaugcaaaguucgucgcugccuggacgcugaaagcggccgcugcagccuaccaauauauuaaggcuaauagcaaguuuaucggcauaaccgaacucugaggacuaguuauaagacugacuagcccgaugggccucccaacgggcccuccuccccuccuugcaccgagauuaaucaaaggcucuuuucagagccaccaaaaaaaaaaaaaaaaaaaaaaaaaaaaaaaaaaaaaaaaaaaaaaaaaaaaaaaaaaaaaaaaaaaaaaaaaaaaaaaaaaaaaaaaaaaaaaaaaaaaa

SEQ ID NO: 10031 - RNA, 1260 nt, Artificial Sequence
  mRNA Design i-3 (hSL-A100) comprising derived and/or modified sequence from Pf(3D7)__XP_001351122.1__HsALB_Pf-CSP(19-272)_L(AAY)_Pf-CSP(310-3 27)_Linker (AAY)_Pf-CSP(346-397) (opt3)
aggagaaagcuuaccaugaagugggugaccuucaucagccugcucuuucuuuucuccucugccuacucacuguuucaggaguaucaaugcuacggcaguagcuccaacacaagagucuugaaugaauuaaacuaugacaaugcugggacuaaccuguacaaugagcuagaaaugaacuauuacggaaaacaggagaauugguauucucucaagaaaaacucgaggucacugggugaaaaugaugacggcaacaaugaggauaacgagaaguuacggaaacccaagcacaagaaacugaagcagccugcagacgggaauccagauccgaacgccaaucccaacguugacccuaacgcgaauccaaacguggaucccaaugcuaacccuaauguagacccaaacgccaaucccaacgcaaauccuaacgccaauccaaacgcuaauccgaacgcaaaucccaacgccaacccuaaugcuaacccaaaugccaaccccaaugcgaacccuaaugcaaacccaaaugccaaccccaaugcuaacccgaaugccaacccuaaugcaaaccccaacgcuaauccaaacgccaauccuaacgcgaaucccaacguggauccaaaugccaaccccaaugcaaacccuaaugcuaacccaaaugccaacccgaaugcuaaccccaacgccaauccuaacgcaaauccaaacgccaaucccaacgcuaauccuaacgcgaauccaaacgcaaaucccaacgccaauccgaacgcuaauccuaacgccaauccaaacgcaaaccccaaugccaacccuaaugcuaaccccaaugccaacccagcagcguacgaaccuagcgacaaacauauuaaggaguacuugaauaaaauacagaacagucucgcugccuauaucaagcccggauccgcaaauaagccaaaagaugaacuggacuacgccaacgauauugagaagaaaaucuguaagauggagaaaugcucuagcgucuucaaugugguuaacuccucaauuggccugaucauggugcucaguuuucuuuuccugaauugaggacuaguuauaagacugacuagcccgaugggccucccaacgggcccuccuccccuccuugcaccgagauuaaucaaaggcucuuuucagagccaccaaaaaaaaaaaaaaaaaaaaaaaaaaaaaaaaaaaaaaaaaaaaaaaaaaaaaaaaaaaaaaaaaaaaaaaaaaaaaaaaaaaaaaaaaaaaaaaaaaaaa

SEQ ID NO: 10032 - RNA, 1860 nt, Artificial Sequence
  mRNA Design i-3 (hSL-A100) comprising derived and/or modified sequence from Pf(3D7)__XP_001351122.1__LumSynt_L(GGS4-GGG)_Pf-CSP(19-397) (opt4)
aggagaaagcuuaccaugcagaucuacgagggcaagcugaccgccgagggccugagauucggcaucguggccagcagauucaaccacgcccugguggacagacugguggagggcgccaucgacgccaucgugagacacggcggcagagaggaggacaucacccuggugagagugcccggcagcugggagauccccguggccgccggcgagcuggccagaaaggaggacaucgacgccgugaucgccaucggcgugcugaucagaggcgccaccccccacuucgacuacaucgccagcgaggugagcaagggccuggccgaccugagccuggagcugagaaagcccaucaccuucggcgugaucaccgccgacacccuggagcaggccaucgagagagccggcaccaagcacggcaacaagggcugggaggccgcccugagcgccaucgagauggccaaccuguucaagagccugagaggcggcagcggcggcagcggcggcagcggcggcagcggcggcggccuguuccaggaguaccagugcuacggcagcagcagcaacaccagagugcugaacgagcugaacuacgacaacgccggcaccaaccuguacaacgagcuggagaugaacuacuacggcaagcaggagaacugguacagccugaagaagaacagcagaagccugggcgagaacgacgacggcaacaacgaggacaacgagaagcugagaaagcccaagcacaagaagcugaagcagcccgccgacggcaaccccgaccccaacgccaaccccaacguggaccccaacgccaaccccaacguggaccccaacgccaaccccaacguggaccccaacgccaaccccaacgccaaccccaacgccaaccccaacgccaaccccaacgccaaccccaacgccaaccccaacgccaaccccaacgccaaccccaacgccaaccccaacgccaaccccaacgccaaccccaacgccaaccccaacgccaaccccaacgccaaccccaacgccaaccccaacgccaaccccaacgccaaccccaacguggaccccaacgccaaccccaacgccaaccccaacgccaaccccaacgccaaccccaacgccaaccccaacgccaaccccaacgccaaccccaacgccaaccccaacgccaaccccaacgccaaccccaacgccaaccccaacgccaaccccaacgccaaccccaacgccaaccccaacgccaaccccaacgccaaccccaacgccaaccccaacgccaaccccaacaagaacaaccagggcaacggccagggccacaacaugcccaacgaccccaacagaaacguggacgagaacgccaacgccaacagcgccgugaagaacaacaacaacgaggagcccagcgacaagcacaucaaggaguaccugaacaagauccagaacagccugagcaccgaguggagccccugcagcgugaccugcggcaacggcauccaggugagaaucaagcccggcagcgccaacaagcccaaggacgagcuggacuacgccaacgacaucgagaagaagaucugcaagauggagaagugcagcagcguguucaacguggugaacagcagcaucggccugaucauggugcugagcuuccuguuccugaacugaggacuaguuauaagacugacuagcccgaugggccucccaacgggcccuccuccccuccuugcaccgagauuaaucaaaggcucuuuucagagccaccaaaaaaaaaaaaaaaaaaaaaaaaaaaaaaaaaaaaaaaaaaaaaaaaaaaaaaaaaaaaaaaaaaaaaaaaaaaaaaaaaaaaaaaaaaaaaaaaaaaaa

SEQ ID NO: 10033 - RNA, 1722 nt, Artificial Sequence
  mRNA Design i-3 (hSL-A100) comprising derived and/or modified sequence from Pf(3D7)__XP_001351122.1__HsALB_Pf-CSP(19-272)_L(PVTN)_HBsAg (opt4)
aggagaaagcuuaccaugaagugggugaccuucaucagccugcuguuccuguucagcagcgccuacagccuguuccaggaguaccagugcuacggcagcagcagcaacaccagagugcugaacgagcugaacuacgacaacgccggcaccaaccuguacaacgagcuggagaugaacuacuacggcaagcaggagaacugguacagccugaagaagaacagcagaagccugggcgagaacgacgacggcaacaacgaggacaacgagaagcugagaaagcccaagcacaagaagcugaagcagcccgccgacggcaaccccgaccccaacgccaaccccaacguggaccccaacgccaaccccaacguggaccccaacgccaaccccaacguggaccccaacgccaaccccaacgccaaccccaacgccaaccccaacgccaaccccaacgccaaccccaacgccaaccccaacgccaaccccaacgccaaccccaacgccaaccccaacgccaaccccaacgccaaccccaacgccaaccccaacgccaaccccaacgccaaccccaacgccaaccccaacgccaaccccaacgccaaccccaacguggaccccaacgccaaccccaacgccaaccccaacgccaaccccaacgccaaccccaacgccaaccccaacgccaaccccaacgccaaccccaacgccaaccccaacgccaaccccaacgccaaccccaacgccaaccccaacgccaaccccaacgccaaccccaacgccaaccccaacgccaaccccaacgccaaccccaacgccaaccccaacgccaacccccccgugaccaacauggagaacaucaccagcggcuuccugggcccccugcuggugcugcaggccggcuucuuccugcugaccagaauccugaccaucccccagagccuggacagcugguggaccagccugaacuuccugggcggcagccccgugugccugggccagaacagccagagccccaccagcaaccacagccccaccagcugcccccccaucugccccggcuacagauggaugugccugagaagauucaucaucuuccuguucauccugcugcugugccugaucuuccugcuggugcugcuggacuaccagggcaugcugcccgugugcccccugauccccggcagcaccaccaccaacaccggccccugcaagaccugcaccacccccgcccagggcaacagcauguuccccagcugcugcugcaccaagcccaccgacggcaacugcaccugcauccccauccccagcagcugggccuucgccaaguaccugugggagugggccagcgugagauucagcuggcugagccugcuggugcccuucgugcagugguucgugggccugagccccaccguguggcugagcgccaucuggaugaugugguacuggggccccagccuguacagcaucgugagccccuucaucccccugcugcccaucuucuucugccuguggguguacaucugaggacuaguuauaagacugacuagcccgaugggccucccaacgggcccuccuccccuccuugcaccgagauuaaucaaaggcucuuuucagagccaccaaaaaaaaaaaaaaaaaaaaaaaaaaaaaaaaaaaaaaaaaaaaaaaaaaaaaaaaaaaaaaaaaaaaaaaaaaaaaaaaaaaaaaaaaaaaaaaaaaaaa

SEQ ID NO: 10034 - RNA, 1839 nt, Artificial Sequence
  mRNA Design i-3 (hSL-A100) comprising derived and/or modified sequence from Pf(3D7)__XP_001351122.1__HsALB_Pf-CSP(19-272)_L(AAY)_Pf-CSP(346-3 65)_L(AAY)_PADRE_L(PVTN)_HBsAg (opt4)
aggagaaagcuuaccaugaagugggugaccuucaucagccugcuguuccuguucagcagcgccuacagccuguuccaggaguaccagugcuacggcagcagcagcaacaccagagugcugaacgagcugaacuacgacaacgccggcaccaaccuguacaacgagcuggagaugaacuacuacggcaagcaggagaacugguacagccugaagaagaacagcagaagccugggcgagaacgacgacggcaacaacgaggacaacgagaagcugagaaagcccaagcacaagaagcugaagcagcccgccgacggcaaccccgaccccaacgccaaccccaacguggaccccaacgccaaccccaacguggaccccaacgccaaccccaacguggaccccaacgccaaccccaacgccaaccccaacgccaaccccaacgccaaccccaacgccaaccccaacgccaaccccaacgccaaccccaacgccaaccccaacgccaaccccaacgccaaccccaacgccaaccccaacgccaaccccaacgccaaccccaacgccaaccccaacgccaaccccaacgccaaccccaacgccaaccccaacguggaccccaacgccaaccccaacgccaaccccaacgccaaccccaacgccaaccccaacgccaaccccaacgccaaccccaacgccaaccccaacgccaaccccaacgccaaccccaacgccaaccccaacgccaaccccaacgccaaccccaacgccaaccccaacgccaaccccaacgccaaccccaacgccaaccccaacgccaaccccaacgccaaccccgccgccuacaucaagcccggcagcgccaacaagcccaaggacgagcuggacuacgccaacgacaucgaggccgccuacgccaaguucguggccgccuggacccugaaggccgccgcccccgugaccaacauggagaacaucaccagcggcuuccugggcccccugcuggugcugcaggccggcuucuuccugcugaccagaauccugaccaucccccagagccuggacagcugguggaccagccugaacuuccugggcggcagccccgugugccugggccagaacagccagagccccaccagcaaccacagccccaccagcugcccccccaucugccccggcuacagauggaugugccugagaagauucaucaucuuccuguucauccugcugcugugccugaucuuccugcuggugcugcuggacuaccagggcaugcugcccgugugcccccugauccccggcagcaccaccaccaacaccggccccugcaagaccugcaccacccccgcccagggcaacagcauguuccccagcugcugcugcaccaagcccaccgacggcaacugcaccugcauccccauccccagcagcugggccuucgccaaguaccugugggagugggccagcgugagauucagcuggcugagccugcuggugcccuucgugcagugguucgugggccugagccccaccguguggcugagcgccaucuggaugaugugguacuggggccccagccuguacagcaucgugagccccuucaucccccugcugcccaucuucuucugccuguggguguacaucugaggacuaguuauaagacugacuagcccgaugggccucccaacgggcccuccuccccuccuugcaccgagauuaaucaaaggcucuuuucagagccaccaaaaaaaaaaaaaaaaaaaaaaaaaaaaaaaaaaaaaaaaaaaaaaaaaaaaaaaaaaaaaaaaaaaaaaaaaaaaaaaaaaaaaaaaaaaaaaaaaaaaa

SEQ ID NO: 10035 - RNA, 2058 nt, Artificial Sequence
  mRNA Design i-3 (hSL-A100) comprising derived and/or modified sequence from Pf(3D7)__XP_001351122.1__HsALB_Pf-CSP(19-384)_L(PVTN)_HBsAg (opt4)
aggagaaagcuuaccaugaagugggugaccuucaucagccugcuguuccuguucagcagcgccuacagccuguuccaggaguaccagugcuacggcagcagcagcaacaccagagugcugaacgagcugaacuacgacaacgccggcaccaaccuguacaacgagcuggagaugaacuacuacggcaagcaggagaacugguacagccugaagaagaacagcagaagccugggcgagaacgacgacggcaacaacgaggacaacgagaagcugagaaagcccaagcacaagaagcugaagcagcccgccgacggcaaccccgaccccaacgccaaccccaacguggaccccaacgccaaccccaacguggaccccaacgccaaccccaacguggaccccaacgccaaccccaacgccaaccccaacgccaaccccaacgccaaccccaacgccaaccccaacgccaaccccaacgccaaccccaacgccaaccccaacgccaaccccaacgccaaccccaacgccaaccccaacgccaaccccaacgccaaccccaacgccaaccccaacgccaaccccaacgccaaccccaacgccaaccccaacguggaccccaacgccaaccccaacgccaaccccaacgccaaccccaacgccaaccccaacgccaaccccaacgccaaccccaacgccaaccccaacgccaaccccaacgccaaccccaacgccaaccccaacgccaaccccaacgccaaccccaacgccaaccccaacgccaaccccaacgccaaccccaacgccaaccccaacgccaaccccaacgccaaccccaacaagaacaaccagggcaacggccagggccacaacaugcccaacgaccccaacagaaacguggacgagaacgccaacgccaacagcgccgugaagaacaacaacaacgaggagcccagcgacaagcacaucaaggaguaccugaacaagauccagaacagccugagcaccgaguggagccccugcagcgugaccugcggcaacggcauccaggugagaaucaagcccggcagcgccaacaagcccaaggacgagcuggacuacgccaacgacaucgagaagaagaucugcaagauggagaagugcagcagcguguucaacguggugaacagcagccccgugaccaacauggagaacaucaccagcggcuuccugggcccccugcuggugcugcaggccggcuucuuccugcugaccagaauccugaccaucccccagagccuggacagcugguggaccagccugaacuuccugggcggcagccccgugugccugggccagaacagccagagccccaccagcaaccacagccccaccagcugcccccccaucugccccggcuacagauggaugugccugagaagauucaucaucuuccuguucauccugcugcugugccugaucuuccugcuggugcugcuggacuaccagggcaugcugcccgugugcccccugauccccggcagcaccaccaccaacaccggccccugcaagaccugcaccacccccgcccagggcaacagcauguuccccagcugcugcugcaccaagcccaccgacggcaacugcaccugcauccccauccccagcagcugggccuucgccaaguaccugugggagugggccagcgugagauucagcuggcugagccugcuggugcccuucgugcagugguucgugggccugagccccaccguguggcugagcgccaucuggaugaugugguacuggggccccagccuguacagcaucgugagccccuucaucccccugcugcccaucuucuucugccuguggguguacaucugaggacuaguuauaagacugacuagcccgaugggccucccaacgggcccuccuccccuccuugcaccgagauuaaucaaaggcucuuuucagagccaccaaaaaaaaaaaaaaaaaaaaaaaaaaaaaaaaaaaaaaaaaaaaaaaaaaaaaaaaaaaaaaaaaaaaaaaaaaaaaaaaaaaaaaaaaaaaaaaaaaaaa

SEQ ID NO: 10036 - RNA, 1875 nt, Artificial Sequence
  mRNA Design i-3 (hSL-A100) comprising derived and/or modified sequence from Pf(3D7)__XP_001351122.1__HsALB_Pf-CSP(19-384)_L(SGG)_Ferritin (opt4)
aggagaaagcuuaccaugaagugggugaccuucaucagccugcuguuccuguucagcagcgccuacagccuguuccaggaguaccagugcuacggcagcagcagcaacaccagagugcugaacgagcugaacuacgacaacgccggcaccaaccuguacaacgagcuggagaugaacuacuacggcaagcaggagaacugguacagccugaagaagaacagcagaagccugggcgagaacgacgacggcaacaacgaggacaacgagaagcugagaaagcccaagcacaagaagcugaagcagcccgccgacggcaaccccgaccccaacgccaaccccaacguggaccccaacgccaaccccaacguggaccccaacgccaaccccaacguggaccccaacgccaaccccaacgccaaccccaacgccaaccccaacgccaaccccaacgccaaccccaacgccaaccccaacgccaaccccaacgccaaccccaacgccaaccccaacgccaaccccaacgccaaccccaacgccaaccccaacgccaaccccaacgccaaccccaacgccaaccccaacgccaaccccaacgccaaccccaacguggaccccaacgccaaccccaacgccaaccccaacgccaaccccaacgccaaccccaacgccaaccccaacgccaaccccaacgccaaccccaacgccaaccccaacgccaaccccaacgccaaccccaacgccaaccccaacgccaaccccaacgccaaccccaacgccaaccccaacgccaaccccaacgccaaccccaacgccaaccccaacgccaaccccaacaagaacaaccagggcaacggccagggccacaacaugcccaacgaccccaacagaaacguggacgagaacgccaacgccaacagcgccgugaagaacaacaacaacgaggagcccagcgacaagcacaucaaggaguaccugaacaagauccagaacagccugagcaccgaguggagccccugcagcgugaccugcggcaacggcauccaggugagaaucaagcccggcagcgccaacaagcccaaggacgagcuggacuacgccaacgacaucgagaagaagaucugcaagauggagaagugcagcagcguguucaacguggugaacagcagcagcggcggccugagcaaggacaucaucaagcugcugaacgagcaggugaacaaggagaugaacagcagcaaccuguacaugagcaugagcagcuggugcuacacccacagccuggacggcgccggccuguuccuguucgaccacgccgccgaggaguacgagcacgccaagaagcugaucaucuuccugaacgagaacaacgugcccgugcagcugaccagcaucagcgcccccgagcacaaguucgagggccugacccagaucuuccagaaggccuacgagcacgagcagcacaucagcgagagcaucaacaacaucguggaccacgccaucaagagcaaggaccacgccaccuucaacuuccugcagugguacguggccgagcagcacgaggaggaggugcuguucaaggacauccuggacaagaucgagcugaucggcaacgagaaccacggccuguaccuggccgaccaguacgugaagggcaucgccaagagcagaaagagcugaggacuaguuauaagacugacuagcccgaugggccucccaacgggcccuccuccccuccuugcaccgagauuaaucaaaggcucuuuucagagccaccaaaaaaaaaaaaaaaaaaaaaaaaaaaaaaaaaaaaaaaaaaaaaaaaaaaaaaaaaaaaaaaaaaaaaaaaaaaaaaaaaaaaaaaaaaaaaaaaaaaaa

SEQ ID NO: 10037 - RNA, 1836 nt, Artificial Sequence
  mRNA Design i-3 (hSL-A100) comprising derived and/or modified sequence from Pf(3D7)__XP_001351122.1__HsALB_Pf-CSP(93-384)_L(PVTN)_HBsAg (opt4)
aggagaaagcuuaccaugaagugggugaccuucaucagccugcuguuccuguucagcagcgccuacagcaagcugaagcagcccgccgacggcaaccccgaccccaacgccaaccccaacguggaccccaacgccaaccccaacguggaccccaacgccaaccccaacguggaccccaacgccaaccccaacgccaaccccaacgccaaccccaacgccaaccccaacgccaaccccaacgccaaccccaacgccaaccccaacgccaaccccaacgccaaccccaacgccaaccccaacgccaaccccaacgccaaccccaacgccaaccccaacgccaaccccaacgccaaccccaacgccaaccccaacgccaaccccaacguggaccccaacgccaaccccaacgccaaccccaacgccaaccccaacgccaaccccaacgccaaccccaacgccaaccccaacgccaaccccaacgccaaccccaacgccaaccccaacgccaaccccaacgccaaccccaacgccaaccccaacgccaaccccaacgccaaccccaacgccaaccccaacgccaaccccaacgccaaccccaacgccaaccccaacaagaacaaccagggcaacggccagggccacaacaugcccaacgaccccaacagaaacguggacgagaacgccaacgccaacagcgccgugaagaacaacaacaacgaggagcccagcgacaagcacaucaaggaguaccugaacaagauccagaacagccugagcaccgaguggagccccugcagcgugaccugcggcaacggcauccaggugagaaucaagcccggcagcgccaacaagcccaaggacgagcuggacuacgccaacgacaucgagaagaagaucugcaagauggagaagugcagcagcguguucaacguggugaacagcagccccgugaccaacauggagaacaucaccagcggcuuccugggcccccugcuggugcugcaggccggcuucuuccugcugaccagaauccugaccaucccccagagccuggacagcugguggaccagccugaacuuccugggcggcagccccgugugccugggccagaacagccagagccccaccagcaaccacagccccaccagcugcccccccaucugccccggcuacagauggaugugccugagaagauucaucaucuuccuguucauccugcugcugugccugaucuuccugcuggugcugcuggacuaccagggcaugcugcccgugugcccccugauccccggcagcaccaccaccaacaccggccccugcaagaccugcaccacccccgcccagggcaacagcauguuccccagcugcugcugcaccaagcccaccgacggcaacugcaccugcauccccauccccagcagcugggccuucgccaaguaccugugggagugggccagcgugagauucagcuggcugagccugcuggugcccuucgugcagugguucgugggccugagccccaccguguggcugagcgccaucuggaugaugugguacuggggccccagccuguacagcaucgugagccccuucaucccccugcugcccaucuucuucugccuguggguguacaucugaggacuaguuauaagacugacuagcccgaugggccucccaacgggcccuccuccccuccuugcaccgagauuaaucaaaggcucuuuucagagccaccaaaaaaaaaaaaaaaaaaaaaaaaaaaaaaaaaaaaaaaaaaaaaaaaaaaaaaaaaaaaaaaaaaaaaaaaaaaaaaaaaaaaaaaaaaaaaaaaaaaaa

SEQ ID NO: 10038 - RNA, 1497 nt, Artificial Sequence; identical to SEQ ID NO: 8651
  mRNA Design i-3 (hSL-A100) comprising derived and/or modified sequence from Pf(3D7)__XP_001351122.1__HsALB_Pf-CSP(199-377)_L(PVTN)_HBsAg (opt4)

SEQ ID NO: 10039 - RNA, 1194 nt, Artificial Sequence
  mRNA Design i-3 (hSL-A100) comprising derived and/or modified sequence from Pf(3D7)__XP_001351122.1__HsALB_Pf-CSP(19-272)_L(AAY)_Pf-CSP(346-3 75)_L(AAY)_Pf-CSP(310-327) (opt4)
aggagaaagcuuaccaugaagugggugaccuucaucagccugcuguuccuguucagcagcgccuacagccuguuccaggaguaccagugcuacggcagcagcagcaacaccagagugcugaacgagcugaacuacgacaacgccggcaccaaccuguacaacgagcuggagaugaacuacuacggcaagcaggagaacugguacagccugaagaagaacagcagaagccugggcgagaacgacgacggcaacaacgaggacaacgagaagcugagaaagcccaagcacaagaagcugaagcagcccgccgacggcaaccccgaccccaacgccaaccccaacguggaccccaacgccaaccccaacguggaccccaacgccaaccccaacguggaccccaacgccaaccccaacgccaaccccaacgccaaccccaacgccaaccccaacgccaaccccaacgccaaccccaacgccaaccccaacgccaaccccaacgccaaccccaacgccaaccccaacgccaaccccaacgccaaccccaacgccaaccccaacgccaaccccaacgccaaccccaacgccaaccccaacgccaaccccaacguggaccccaacgccaaccccaacgccaaccccaacgccaaccccaacgccaaccccaacgccaaccccaacgccaaccccaacgccaaccccaacgccaaccccaacgccaaccccaacgccaaccccaacgccaaccccaacgccaaccccaacgccaaccccaacgccaaccccaacgccaaccccaacgccaaccccaacgccaaccccaacgccaaccccgccgccuacaucaagcccggcagcgccaacaagcccaaggacgagcuggacuacgccaacgacaucgagaagaagaucugcaagauggagaagugcagcgccgccuacgagcccagcgacaagcacaucaaggaguaccugaacaagauccagaacagccugugaggacuaguuauaagacugacuagcccgaugggccucccaacgggcccuccuccccuccuugcaccgagauuaaucaaaggcucuuuucagagccaccaaaaaaaaaaaaaaaaaaaaaaaaaaaaaaaaaaaaaaaaaaaaaaaaaaaaaaaaaaaaaaaaaaaaaaaaaaaaaaaaaaaaaaaaaaaaaaaaaaaaa

SEQ ID NO: 10040 - RNA, 1242 nt, Artificial Sequence
  mRNA Design i-3 (hSL-A100) comprising derived and/or modified sequence from Pf(3D7)__XP_001351122.1__HsALB_Pf-CSP(19-272)_L(AAY)_Pf-CSP(346-3 75)_L(AAY)_Pf-CSP(310-327)_L(AAY)_PADRE (opt4)
aggagaaagcuuaccaugaagugggugaccuucaucagccugcuguuccuguucagcagcgccuacagccuguuccaggaguaccagugcuacggcagcagcagcaacaccagagugcugaacgagcugaacuacgacaacgccggcaccaaccuguacaacgagcuggagaugaacuacuacggcaagcaggagaacugguacagccugaagaagaacagcagaagccugggcgagaacgacgacggcaacaacgaggacaacgagaagcugagaaagcccaagcacaagaagcugaagcagcccgccgacggcaaccccgaccccaacgccaaccccaacguggaccccaacgccaaccccaacguggaccccaacgccaaccccaacguggaccccaacgccaaccccaacgccaaccccaacgccaaccccaacgccaaccccaacgccaaccccaacgccaaccccaacgccaaccccaacgccaaccccaacgccaaccccaacgccaaccccaacgccaaccccaacgccaaccccaacgccaaccccaacgccaaccccaacgccaaccccaacgccaaccccaacgccaaccccaacguggaccccaacgccaaccccaacgccaaccccaacgccaaccccaacgccaaccccaacgccaaccccaacgccaaccccaacgccaaccccaacgccaaccccaacgccaaccccaacgccaaccccaacgccaaccccaacgccaaccccaacgccaaccccaacgccaaccccaacgccaaccccaacgccaaccccaacgccaaccccaacgccaaccccgccgccuacaucaagcccggcagcgccaacaagcccaaggacgagcuggacuacgccaacgacaucgagaagaagaucugcaagauggagaagugcagcgccgccuacgagcccagcgacaagcacaucaaggaguaccugaacaagauccagaacagccuggccgccuacgccaaguucguggccgccuggacccugaaggccgccgccugaggacuaguuauaagacugacuagcccgaugggccucccaacgggcccuccuccccuccuugcaccgagauuaaucaaaggcucuuuucagagccaccaaaaaaaaaaaaaaaaaaaaaaaaaaaaaaaaaaaaaaaaaaaaaaaaaaaaaaaaaaaaaaaaaaaaaaaaaaaaaaaaaaaaaaaaaaaaaaaaaaaaa

SEQ ID NO: 10041 - RNA, 1242 nt, Artificial Sequence
  mRNA Design i-3 (hSL-A100) comprising derived and/or modified sequence from Pf(3D7)__XP_001351122.1__HsALB_Pf-CSP(19-272)_L(AAY)_Pf-CSP(310-3 27)_L(AAY)_Pf-CSP(346-375)_L(AAY)_PADRE (opt4)
aggagaaagcuuaccaugaagugggugaccuucaucagccugcuguuccuguucagcagcgccuacagccuguuccaggaguaccagugcuacggcagcagcagcaacaccagagugcugaacgagcugaacuacgacaacgccggcaccaaccuguacaacgagcuggagaugaacuacuacggcaagcaggagaacugguacagccugaagaagaacagcagaagccugggcgagaacgacgacggcaacaacgaggacaacgagaagcugagaaagcccaagcacaagaagcugaagcagcccgccgacggcaaccccgaccccaacgccaaccccaacguggaccccaacgccaaccccaacguggaccccaacgccaaccccaacguggaccccaacgccaaccccaacgccaaccccaacgccaaccccaacgccaaccccaacgccaaccccaacgccaaccccaacgccaaccccaacgccaaccccaacgccaaccccaacgccaaccccaacgccaaccccaacgccaaccccaacgccaaccccaacgccaaccccaacgccaaccccaacgccaaccccaacgccaaccccaacguggaccccaacgccaaccccaacgccaaccccaacgccaaccccaacgccaaccccaacgccaaccccaacgccaaccccaacgccaaccccaacgccaaccccaacgccaaccccaacgccaaccccaacgccaaccccaacgccaaccccaacgccaaccccaacgccaaccccaacgccaaccccaacgccaaccccaacgccaaccccaacgccaaccccgccgccuacgagcccagcgacaagcacaucaaggaguaccugaacaagauccagaacagccuggccgccuacaucaagcccggcagcgccaacaagcccaaggacgagcuggacuacgccaacgacaucgagaagaagaucugcaagauggagaagugcagcgccgccuacgccaaguucguggccgccuggacccugaaggccgccgccugaggacuaguuauaagacugacuagcccgaugggccucccaacgggcccuccuccccuccuugcaccgagauuaaucaaaggcucuuuucagagccaccaaaaaaaaaaaaaaaaaaaaaaaaaaaaaaaaaaaaaaaaaaaaaaaaaaaaaaaaaaaaaaaaaaaaaaaaaaaaaaaaaaaaaaaaaaaaaaaaaaaaa

SEQ ID NO: 10042 - RNA, 1296 nt, Artificial Sequence
  mRNA Design i-3 (hSL-A100) comprising derived and/or modified sequence from Pf(3D7)__XP_001351122.1__HsALB_Pf-CSP(19-272)_L(AAY)_Pf-CSP(310-3 27)_L(AAY)_Pf-CSP(346-375)_L(AAY)_PADRE_L(AAY)_P2 (opt4)
aggagaaagcuuaccaugaagugggugaccuucaucagccugcuguuccuguucagcagcgccuacagccuguuccaggaguaccagugcuacggcagcagcagcaacaccagagugcugaacgagcugaacuacgacaacgccggcaccaaccuguacaacgagcuggagaugaacuacuacggcaagcaggagaacugguacagccugaagaagaacagcagaagccugggcgagaacgacgacggcaacaacgaggacaacgagaagcugagaaagcccaagcacaagaagcugaagcagcccgccgacggcaaccccgaccccaacgccaaccccaacguggaccccaacgccaaccccaacguggaccccaacgccaaccccaacguggaccccaacgccaaccccaacgccaaccccaacgccaaccccaacgccaaccccaacgccaaccccaacgccaaccccaacgccaaccccaacgccaaccccaacgccaaccccaacgccaaccccaacgccaaccccaacgccaaccccaacgccaaccccaacgccaaccccaacgccaaccccaacgccaaccccaacgccaaccccaacguggaccccaacgccaaccccaacgccaaccccaacgccaaccccaacgccaaccccaacgccaaccccaacgccaaccccaacgccaaccccaacgccaaccccaacgccaaccccaacgccaaccccaacgccaaccccaacgccaaccccaacgccaaccccaacgccaaccccaacgccaaccccaacgccaaccccaacgccaaccccaacgccaaccccgccgccuacgagcccagcgacaagcacaucaaggaguaccugaacaagauccagaacagccuggccgccuacaucaagcccggcagcgccaacaagcccaaggacgagcuggacuacgccaacgacaucgagaagaagaucugcaagauggagaagugcagcgccgccuacgccaaguucguggccgccuggacccugaaggccgccgccgccgccuaccaguacaucaaggccaacagcaaguucaucggcaucaccgagcugugaggacuaguuauaagacugacuagcccgaugggccucccaacgggcccuccuccccuccuugcaccgagauuaaucaaaggcucuuuucagagccaccaaaaaaaaaaaaaaaaaaaaaaaaaaaaaaaaaaaaaaaaaaaaaaaaaaaaaaaaaaaaaaaaaaaaaaaaaaaaaaaaaaaaaaaaaaaaaaaaaaaaa

SEQ ID NO: 10043 - RNA, 1260 nt, Artificial Sequence
  mRNA Design i-3 (hSL-A100) comprising derived and/or modified sequence from Pf(3D7)__XP_001351122.1__HsALB_Pf-CSP(19-272)_L(AAY)_Pf-CSP(310-3 27)_Linker (AAY)_Pf-CSP(346-397) (opt4)
aggagaaagcuuaccaugaagugggugaccuucaucagccugcuguuccuguucagcagcgccuacagccuguuccaggaguaccagugcuacggcagcagcagcaacaccagagugcugaacgagcugaacuacgacaacgccggcaccaaccuguacaacgagcuggagaugaacuacuacggcaagcaggagaacugguacagccugaagaagaacagcagaagccugggcgagaacgacgacggcaacaacgaggacaacgagaagcugagaaagcccaagcacaagaagcugaagcagcccgccgacggcaaccccgaccccaacgccaaccccaacguggaccccaacgccaaccccaacguggaccccaacgccaaccccaacguggaccccaacgccaaccccaacgccaaccccaacgccaaccccaacgccaaccccaacgccaaccccaacgccaaccccaacgccaaccccaacgccaaccccaacgccaaccccaacgccaaccccaacgccaaccccaacgccaaccccaacgccaaccccaacgccaaccccaacgccaaccccaacgccaaccccaacgccaaccccaacguggaccccaacgccaaccccaacgccaaccccaacgccaaccccaacgccaaccccaacgccaaccccaacgccaaccccaacgccaaccccaacgccaaccccaacgccaaccccaacgccaaccccaacgccaaccccaacgccaaccccaacgccaaccccaacgccaaccccaacgccaaccccaacgccaaccccaacgccaaccccaacgccaaccccgccgccuacgagcccagcgacaagcacaucaaggaguaccugaacaagauccagaacagccuggccgccuacaucaagcccggcagcgccaacaagcccaaggacgagcuggacuacgccaacgacaucgagaagaagaucugcaagauggagaagugcagcagcguguucaacguggugaacagcagcaucggccugaucauggugcugagcuuccuguuccugaacugaggacuaguuauaagacugacuagcccgaugggccucccaacgggcccuccuccccuccuugcaccgagauuaaucaaaggcucuuuucagagccaccaaaaaaaaaaaaaaaaaaaaaaaaaaaaaaaaaaaaaaaaaaaaaaaaaaaaaaaaaaaaaaaaaaaaaaaaaaaaaaaaaaaaaaaaaaaaaaaaaaaaa

SEQ ID NO: 10044 - RNA, 1860 nt, Artificial Sequence
  mRNA Design i-3 (hSL-A100) comprising derived and/or modified sequence from Pf(3D7)__XP_001351122.1__LumSynt_L(GGS4-GGG)_Pf-CSP(19-397) (opt5)
aggagaaagcuuaccaugcagaucuacgagggcaagcugaccgccgaagggcucagauucggaauuguggcuagccgguuuaaccacgcccuggucgaccgccuuguugagggcgcgaucgaugcuauugugagacaugggggacgggaagaggacaucacacuggugcgcguccccggcuccugggaaauuccuguggccgccggggagcucgcuagaaaagaggauaucgacgccguuaucgcuauuggagugcugauccggggcgccacgccgcacuucgauuauauugcgucugaagucagcaagggccuugccgaccugucccucgagcugcgcaaacccaucaccuuuggggugauuacagcugauacccuggaacaagccaucgagagagcuggaacaaagcauggcaauaaagggugggaggccgcgcucucugccauugaaauggcuaaccuguucaagagccuucggggaggcuccgggggaucuggcggcagcgggggauccggcgggggacuguuucaggaguaccagugcuauggcuccucuuccaauacccgcguucucaacgaacugaauuacgacaacgccgggacaaaucuuuauaacgagcuggaaaugaauuacuauggaaagcaggagaacugguacagccucaaaaagaacucuagaucccugggcgagaaugaugacggcaauaacgaagauaaugagaaacugcggaagccuaaacacaagaagcucaaacaacccgcugacgggaacccugaucccaacgccaauccuaacguggacccgaaugccaaccccaaugucgacccuaacgcuaaucccaacguggauccuaaugcgaaccccaaugccaacccgaaugcuaacccuaaugccaaccccaacgccaauccuaacgcuaaucccaacgccaaucccaacgcgaauccuaacgcuaauccgaacgccaaucccaacgccaauccuaacgcuaaucccaacgccaacccuaaugcuaaccccaaugccaacccgaaugcgaacccuaaugccaaccccaauguggacccuaacgcuaaucccaacgccaauccuaacgcuaaucccaacgccaacccgaaugcgaacccuaaugccaaccccaaugcuaaccccaaugccaacccuaaugcuaacccgaaugccaaccccaaugccaacccuaaugcuaaccccaaugcgaacccuaacgccaaucccaacgcuaauccuaacgccaaucccaacgccaauccgaacgcuaauccuaacaagaauaaccagggaaauggccaggggcauaacaugcccaaugauccuaaccgcaacgucgacgaaaaugccaacgcgaauagcgcuguuaaaaacaauaacaaugaggaacccucugauaagcacaucaaagaguaccugaacaagauccagaauagccuuagcaccgagugguccccguguucugugacgugcggaaacggcauucaagugagaaucaaaccugggagcgccaauaagcccaaggacgaacuggauuaugccaacgacauugagaaaaagaucuguaaaauggaaaagugcuccagcgucuucaaugugguuaacucuuccauuggccucaucauggugcugagcuuucuuuuccugaauugaggacuaguuauaagacugacuagcccgaugggccucccaacgggcccuccuccccuccuugcaccgagauuaaucaaaggcucuuuucagagccaccaaaaaaaaaaaaaaaaaaaaaaaaaaaaaaaaaaaaaaaaaaaaaaaaaaaaaaaaaaaaaaaaaaaaaaaaaaaaaaaaaaaaaaaaaaaaaaaaaaaaa

SEQ ID NO: 10045 - RNA, 1722 nt, Artificial Sequence
  mRNA Design i-3 (hSL-A100) comprising derived and/or modified sequence from Pf(3D7)__XP_001351122.1__HsALB_Pf-CSP(19-272)_L(PVTN)_HBsAg (opt5)
aggagaaagcuuaccaugaagugggugaccuucaucagccugcucuuucuguucuccucugccuacagccuuuuucaggaguaucaaugcuacggcuccucuagcaacacaagaguccugaaugaacucaacuaugacaaugcugggacgaaccuguacaaugagcuugaaaugaacuauuacggaaaacaggagaauugguauucccugaagaaaaacucucggagccucggcgaaaaugaugacgggaacaaugaggauaacgagaagcugcgcaaacccaagcacaagaaacugaagcagccugccgacggaaauccggaucccaacgcgaauccuaacguugaccccaacgcuaauccuaacguggaucccaaugccaacccuaauguggacccgaacgccaaucccaacgcuaauccuaacgccaaucccaacgcuaauccuaacgccaaucccaacgcgaacccgaaugccaacccuaaugcuaaccccaaugccaacccuaaugcuaaccccaaugccaaccccaaugcgaacccuaaugccaacccgaaugcuaaccccaacgccaauccuaacgcuaaucccaacgccaauccuaacgucgaucccaaugccaacccgaaugcuaacccuaaugcgaaccccaaugccaacccuaaugcuaaccccaacgccaauccuaacgccaaucccaacgcuaauccgaacgccaauccuaacgcgaaucccaacgcuaaucccaacgccaauccuaacgccaauccgaacgcuaaucccaacgccaacccuaaugcuaaccccaaugccaacccuaaugcgaaucccccugugaccaacauggaaaacauuacauccggcuuccucgggccccugcuuguucugcaggccggauuuuuccuccugaccagaauccuuacaauuccgcaaagccuggacucuugguggaccucccucaauuuucugggcggcagcccugugugucuggggcagaacucucagucccccacaagcaaucauucuccuaccuccugucccccgaucugcccuggauaccgguggaugugccuccgcagauucauuaucuuucuguucauccuucugcucugucugauuuuucuucugguccuccuggauuaccagggcaugcugcccgugugcccucucauccccgggagcacgaccacaaacaccggacccuguaaaacaugcaccacgccugcucaaggcaauuccauguucccgucuuguugcuguacaaagcccaccgacgggaacugcacaugcauuccuauccccagcuccugggccuuugcuaaauaucugugggagugggccagcguucgguucucuuggcuuucccugcucgugccuuucguccagugguuugugggacugagccccaccguguggcuuucugcgauuuggaugaugugguacuggggcccuagccuguauuccaucgucucuccguucauuccccuccugccuaucuuuuucugucuguggguuuacaucugaggacuaguuauaagacugacuagcccgaugggccucccaacgggcccuccuccccuccuugcaccgagauuaaucaaaggcucuuuucagagccaccaaaaaaaaaaaaaaaaaaaaaaaaaaaaaaaaaaaaaaaaaaaaaaaaaaaaaaaaaaaaaaaaaaaaaaaaaaaaaaaaaaaaaaaaaaaaaaaaaaaaa

SEQ ID NO: 10046 - RNA, 1839 nt, Artificial Sequence
  mRNA Design i-3 (hSL-A100) comprising derived and/or modified sequence from Pf(3D7)__XP_001351122.1__HsALB_Pf-CSP(19-272)_L(AAY)_Pf-CSP(346-3 65)_L(AAY)_PADRE_L(PVTN)_HBsAg (opt5)
aggagaaagcuuaccaugaagugggugaccuucaucagccugcucuuucuguucuccucugccuacagccuuuuucaggaguaucaaugcuacggcuccucuagcaacacaagaguccugaaugaacucaacuaugacaaugcugggacgaaccuguacaaugagcuugaaaugaacuauuacggaaaacaggagaauugguauucccugaagaaaaacucucggagccucggcgaaaaugaugacgggaacaaugaggauaacgagaagcugcgcaaacccaagcacaagaaacugaagcagccugccgacggaaauccggaucccaacgcgaauccuaacguugaccccaacgcuaauccuaacguggaucccaaugccaacccuaauguggacccgaacgccaaucccaacgcuaauccuaacgccaaucccaacgcuaauccuaacgccaaucccaacgcgaacccgaaugccaacccuaaugcuaaccccaaugccaacccuaaugcuaaccccaaugccaaccccaaugcgaacccuaaugccaacccgaaugcuaaccccaacgccaauccuaacgcuaaucccaacgccaauccuaacgucgaucccaaugccaacccgaaugcuaacccuaaugcgaaccccaaugccaacccuaaugcuaaccccaacgccaauccuaacgccaaucccaacgcuaauccgaacgccaauccuaacgcgaaucccaacgcuaaucccaacgccaauccuaacgccaauccgaacgcuaaucccaacgccaacccuaaugcuaaccccaaugccaacccuaaugcgaaccccgccgcuuacauuaaaccuggcuccgccaauaagcccaaagacgaacucgauuacgcuaacgacaucgaggccgcguaugccaaguucguggcugccuggacccugaaggcugccgccccgguuacaaauauggaaaacauuaccagcggguuucuuggaccucugcucgugcugcaggcuggcuucuuucuucugacaagaauccucaccauuccccaaucucuggauuccugguggacaagccugaauuuccucggcgggucuccugucugucugggacagaacucccagagccccaccucuaaucauuccccgacgagcugcccucccaucuguccuggcuaccgguggaugugccuucgcagauuuaucauuuuccuguuuauccuccugcuuugucugauuuuccuccuggugcugcucgacuaucaggggaugcugcccguuugcccccuuaucccuggauccaccacaaccaacacaggcccguguaaaaccugcacgacacccgcgcaaggaaauucuauguuuccuagcuguugcuguaccaagcccacagacgggaacuguaccugcauuccuauccccuccagcugggccuucgcuaaauaccugugggagugggccucugugcgguucuccuggcucagccugcuugucccuuuugugcagugguucgugggccugucuccgaccgucuggcucagcgccauuuggaugaugugguauuggggccccucccuguacucuaucguuagcccuuuuaucccccugcucccuauuuucuuuugccuguggguguauaucugaggacuaguuauaagacugacuagcccgaugggccucccaacgggcccuccuccccuccuugcaccgagauuaaucaaaggcucuuuucagagccaccaaaaaaaaaaaaaaaaaaaaaaaaaaaaaaaaaaaaaaaaaaaaaaaaaaaaaaaaaaaaaaaaaaaaaaaaaaaaaaaaaaaaaaaaaaaaaaaaaaaaa

SEQ ID NO: 10047 - RNA, 2058 nt, Artificial Sequence
  mRNA Design i-3 (hSL-A100) comprising derived and/or modified sequence from Pf(3D7)__XP_001351122.1__HsALB_Pf-CSP(19-384)_L(PVTN)_HBsAg (opt5)
aggagaaagcuuaccaugaagugggugaccuucaucagccugcucuuucuguucuccucugccuacagccuuuuucaggaguaucaaugcuacggcuccucuagcaacacaagaguccugaaugaacucaacuaugacaaugcugggacgaaccuguacaaugagcuugaaaugaacuauuacggaaaacaggagaauugguauucccugaagaaaaacucucggagccucggcgaaaaugaugacgggaacaaugaggauaacgagaagcugcgcaaacccaagcacaagaaacugaagcagccugccgacggaaauccggaucccaacgcgaauccuaacguugaccccaacgcuaauccuaacguggaucccaaugccaacccuaauguggacccgaacgccaaucccaacgcuaauccuaacgccaaucccaacgcuaauccuaacgccaaucccaacgcgaacccgaaugccaacccuaaugcuaaccccaaugccaacccuaaugcuaaccccaaugccaaccccaaugcgaacccuaaugccaacccgaaugcuaaccccaacgccaauccuaacgcuaaucccaacgccaauccuaacgucgaucccaaugccaacccgaaugcuaacccuaaugcgaaccccaaugccaacccuaaugcuaaccccaacgccaauccuaacgccaaucccaacgcuaauccgaacgccaauccuaacgcgaaucccaacgcuaaucccaacgccaauccuaacgccaauccgaacgcuaaucccaacgccaacccuaaugcuaaccccaaugccaacccuaaugcgaaccccaauaaaaacaaucagggcaacgggcaaggacauaauaugccuaacgaccccaauagaaacguggaugaaaaugccaacgcuaacuccgccguuaagaauaacaauaacgaggaaccgagcgacaaacacauuaaggaguaccucaauaagauccagaacucucuguccaccgaguggagcccuuguucugugacaugcggcaauggcauucagguccggaucaaacccggguccgcuaacaagccuaaagaugaacuugacuacgccaaugacauugagaagaaaaucuguaagauggaaaaaugcagcucuguguucaacguugucaauuccagccccgugaccaacauggagaauaucacauccggauuucugggcccgcuccuggugcuucaggcgggguucuuucugcucacccgcauucugacaaucccucaaucucuggauagcugguggaccucccucaacuuccugggaggcagccccgugugucuugggcaaaauucucaguccccuacgagcaaccauucucccaccagcugucccccuauuugcccgggauauagauggaugugccugcggcgcuuuaucauuuuccucuuuauccugcuucugugucucauuuuccugcugguccuccuggacuaccagggcaugcuucccguuugcccucugauccccggcuccacaaccacaaacaccgggccuuguaagacgugcacaacccccgcccagggaaauucuauguuuccuagcugcuguugcacaaagccgaccgauggcaacuguaccugcauccccauuccuuccagcugggcuuucgccaaauaucucugggaaugggcuucugugagauucuccuggcugagccuucuggugcccuuuguccagugguucguggggcucucuccuacaguuuggcuguccgccaucuggaugaugugguacuggggacccagccuguauuccauugugucuccguuuaucccucuccugcccauuuucuuuugucuuugggucuacaucugaggacuaguuauaagacugacuagcccgaugggccucccaacgggcccuccuccccuccuugcaccgagauuaaucaaaggcucuuuucagagccaccaaaaaaaaaaaaaaaaaaaaaaaaaaaaaaaaaaaaaaaaaaaaaaaaaaaaaaaaaaaaaaaaaaaaaaaaaaaaaaaaaaaaaaaaaaaaaaaaaaaaa

SEQ ID NO: 10048 - RNA, 1875 nt, Artificial Sequence
  mRNA Design i-3 (hSL-A100) comprising derived and/or modified sequence from Pf(3D7)__XP_001351122.1__HsALB_Pf-CSP(19-384)_L(SGG)_Ferritin (opt5)
aggagaaagcuuaccaugaagugggugaccuucaucagccugcucuuucuguucuccucugccuacagccuuuuucaggaguaucaaugcuacggcuccucuagcaacacaagagugcugaaugaacucaacuaugacaaugcugggacgaaccuguacaaugagcuugaaaugaacuauuacggaaaacaggagaauugguauucccugaagaaaaacucucggagccucggcgaaaaugaugacgggaacaaugaggauaacgagaagcugcgcaaacccaagcacaagaaacugaagcagccugccgacggaaauccggaucccaacgcgaauccuaacguugaccccaacgcuaauccuaacguggaucccaaugccaacccuaauguggacccgaacgccaaucccaacgcuaauccuaacgccaaucccaacgcuaauccuaacgccaaucccaacgcgaacccgaaugccaacccuaaugcuaaccccaaugccaacccuaaugcuaaccccaaugccaaccccaaugcgaacccuaaugccaacccgaaugcuaaccccaacgccaauccuaacgcuaaucccaacgccaauccuaacgucgaucccaaugccaacccgaaugcuaacccuaaugcgaaccccaaugccaacccuaaugcuaaccccaacgccaauccuaacgccaaucccaacgcuaauccgaacgccaauccuaacgcgaaucccaacgcuaaucccaacgccaauccuaacgccaauccgaacgcuaaucccaacgccaacccuaaugcuaaccccaaugccaacccuaaugcgaaccccaauaaaaacaaucagggcaacgggcaaggacauaauaugccuaacgaccccaauagaaacguggaugaaaaugccaacgcuaacuccgccguuaagaauaacaauaacgaggaaccgagcgacaaacacauuaaggaguaccucaauaagauccagaacucucuguccaccgaguggagcccuuguucugugacaugcggcaauggcauucagguccggaucaaacccggguccgcuaacaagccuaaagaugaacuugacuacgccaaugacauugagaagaaaaucuguaagauggaaaaaugcagcucuguguucaacguugugaacuccagcuccggaggccugucuaaggauaucauuaagcuccugaaugagcaggucaauaaagaaaugaacagcuccaaucuuuauaugagcaugucuuccugguguuacacccauagccuggacggggcgggacucuuucuguucgaucacgccgcugaggaguaugaacaugccaagaaacugaucauuuuucucaacgagaacaaugugcccgugcaacugacaucuaucagcgcuccggaacacaaguucgagggccuuacccagauuuuucagaaagccuacgaacacgagcagcauaucuccgagucuauuaacaauaucgucgaccacgccaucaagagcaaggaucaugcuacauucaacuuucugcaaugguauguugcggaacagcacgaggaagagguccucuucaaagacauucuggauaagaucgaacuuauugggaaugagaaccacggacuguaccucgccgaccaguaugugaaaggcaucgcuaagucccgcaaaagcugaggacuaguuauaagacugacuagcccgaugggccucccaacgggcccuccuccccuccuugcaccgagauuaaucaaaggcucuuuucagagccaccaaaaaaaaaaaaaaaaaaaaaaaaaaaaaaaaaaaaaaaaaaaaaaaaaaaaaaaaaaaaaaaaaaaaaaaaaaaaaaaaaaaaaaaaaaaaaaaaaaaaa

SEQ ID NO: 10049 - RNA, 1836 nt, Artificial Sequence
  mRNA Design i-3 (hSL-A100) comprising derived and/or modified sequence from Pf(3D7)__XP_001351122.1__HsALB_Pf-CSP(93-384)_L(PVTN)_HBsAg (opt5)
aggagaaagcuuaccaugaagugggugaccuucaucagccugcucuuucuguucuccucugccuacagcaaacuuaagcagcccgcugacggcaacccugauccgaaugccaaccccaaugucgacccuaacgcgaaucccaacguugauccuaaugcuaaccccaauguggacccuaacgccaauccgaacgccaaucccaacgcuaauccuaacgccaaccccaaugcuaacccuaaugccaaccccaaugcgaacccgaaugccaacccuaaugcuaaccccaaugccaacccuaaugcuaaccccaaugccaaccccaacgcgaauccuaacgccaauccgaacgcuaaucccaacgccaauccuaacgcuaaucccaacguggauccuaaugccaaccccaaugccaacccgaaugcuaacccuaacgcgaaucccaacgccaauccuaacgcuaaucccaacgccaauccuaacgccaaucccaacgcuaauccgaacgccaauccuaacgcgaaucccaacgcuaaccccaaugccaacccuaaugccaacccgaaugcuaaccccaaugccaacccuaaugcuaaccccaaugccaacccuaauaaaaacaaucaagggaacggacagggccacaauaugcccaacgacccuaacagaaaugucgaugagaacgcgaaugccaacuccgcugugaagaauaacaauaacgaggaacccucugacaaacauauuaaggaauaucugaauaagauccagaacagccucuccacagaguggucuccgugcagcguuacgugugggaaugggauucaggugcggaucaaaccuggcuccgccaacaagcccaaagaugaacuggacuacgcuaaugauauugagaagaaaaucugcaagauggagaaguguagcucugucuuuaacgugguuaauuccagcccugugaccaacauggaaaacaucacaucuggguuccuuggaccccugcucguccugcaagccggcuuuuuccugcucacccgcauucugacaaucccgcagucccuugacagcugguggaccucucugaauuuucucggcggguccccugugugccugggacagaacagccagucccccacaucuaaucacagcccuaccuccuguccucccauuugccccggcuauagauggaugugucuucggcgcuucaucauuuuucuguucauccuccugcugugccucauuuuucugcuugugcugcucgauuaccaagggaugcugccggucuguccccuuaucccuggaagcacgaccacaaacaccggccccugcaaaacauguaccacgccugcgcagggaaauucuauguuccccuccugcugcuguacaaagccuaccgacggaaacugcacauguaucccgauucccagcucuugggccuuugcuaaauaucugugggagugggccagcguuagauucuccuggcucucucugcuggugccuuucgugcagugguuugucggccucagccccaccguguggcuguccgcuaucuggaugaugugguacuggggcccuagccuuuauucuauuguuucccccuucaucccgcugcucccuaucuuuuucugccuguggguguacauuugaggacuaguuauaagacugacuagcccgaugggccucccaacgggcccuccuccccuccuugcaccgagauuaaucaaaggcucuuuucagagccaccaaaaaaaaaaaaaaaaaaaaaaaaaaaaaaaaaaaaaaaaaaaaaaaaaaaaaaaaaaaaaaaaaaaaaaaaaaaaaaaaaaaaaaaaaaaaaaaaaaaaa

SEQ ID NO: 10050 - RNA, 1497 nt, Artificial Sequence; identical to SEQ ID NO: 8681
  mRNA Design i-3 (hSL-A100) comprising derived and/or modified sequence from Pf(3D7)__XP_001351122.1__HsALB_Pf-CSP(199-377)_L(PVTN)_HBsAg (opt5)

SEQ ID NO: 10051 - RNA, 1194 nt, Artificial Sequence
  mRNA Design i-3 (hSL-A100) comprising derived and/or modified sequence from Pf(3D7)__XP_001351122.1__HsALB_Pf-CSP(19-272)_L(AAY)_Pf-CSP(346-3 75)_L(AAY)_Pf-CSP(310-327) (opt5)
aggagaaagcuuaccaugaagugggugaccuucaucagccugcucuuucuguucuccucugccuacagccuuuuucaggaguaucaaugcuacggcuccucuagcaacacaagaguccugaaugaacucaacuaugacaaugcugggacgaaccuguacaaugagcuugaaaugaacuauuacggaaaacaggagaauugguauucccugaagaaaaacucucggagccucggcgaaaaugaugacgggaacaaugaggauaacgagaagcugcgcaaacccaagcacaagaaacugaagcagccugccgacggaaauccggaucccaacgcgaauccuaacguugaccccaacgcuaauccuaacguggaucccaaugccaacccuaauguggacccgaacgccaaucccaacgcuaauccuaacgccaaucccaacgcuaauccuaacgccaaucccaacgcgaacccgaaugccaacccuaaugcuaaccccaaugccaacccuaaugcuaaccccaaugccaaccccaaugcgaacccuaaugccaacccgaaugcuaaccccaacgccaauccuaacgcuaaucccaacgccaauccuaacgucgaucccaaugccaacccgaaugcuaacccuaaugcgaaccccaaugccaacccuaaugcuaaccccaacgccaauccuaacgccaaucccaacgcuaauccgaacgccaauccuaacgcgaaucccaacgcuaaucccaacgccaauccuaacgccaauccgaacgcuaaucccaacgccaacccuaaugcuaaccccaaugccaacccuaaugcgaaccccgccgcuuacauuaaaccuggcuccgccaauaagcccaaagacgaacucgauuacgcuaacgacaucgagaagaagauuuguaaaauggaaaagugcagcgccgcguaugagccgucugauaaacauaucaaggaguaccugaauaaaauucagaacucccuuugaggacuaguuauaagacugacuagcccgaugggccucccaacgggcccuccuccccuccuugcaccgagauuaaucaaaggcucuuuucagagccaccaaaaaaaaaaaaaaaaaaaaaaaaaaaaaaaaaaaaaaaaaaaaaaaaaaaaaaaaaaaaaaaaaaaaaaaaaaaaaaaaaaaaaaaaaaaaaaaaaaaaa

SEQ ID NO: 10052 - RNA, 1242 nt, Artificial Sequence
  mRNA Design i-3 (hSL-A100) comprising derived and/or modified sequence from Pf(3D7)__XP_001351122.1__HsALB_Pf-CSP(19-272)_L(AAY)_Pf-CSP(346-3 75)_L(AAY)_Pf-CSP(310-327)_L(AAY)_PADRE (opt5)
aggagaaagcuuaccaugaagugggugaccuucaucagccugcucuuucuguucuccucugccuacagccuuuuucaggaguaucaaugcuacggcuccucuagcaacacaagaguccugaaugaacucaacuaugacaaugcugggacgaaccuguacaaugagcuugaaaugaacuauuacggaaaacaggagaauugguauucccugaagaaaaacucucggagccucggcgaaaaugaugacgggaacaaugaggauaacgagaagcugcgcaaacccaagcacaagaaacugaagcagccugccgacggaaauccggaucccaacgcgaauccuaacguugaccccaacgcuaauccuaacguggaucccaaugccaacccuaauguggacccgaacgccaaucccaacgcuaauccuaacgccaaucccaacgcuaauccuaacgccaaucccaacgcgaacccgaaugccaacccuaaugcuaaccccaaugccaacccuaaugcuaaccccaaugccaaccccaaugcgaacccuaaugccaacccgaaugcuaaccccaacgccaauccuaacgcuaaucccaacgccaauccuaacgucgaucccaaugccaacccgaaugcuaacccuaaugcgaaccccaaugccaacccuaaugcuaaccccaacgccaauccuaacgccaaucccaacgcuaauccgaacgccaauccuaacgcgaaucccaacgcuaaucccaacgccaauccuaacgccaauccgaacgcuaaucccaacgccaacccuaaugcuaaccccaaugccaacccuaaugcgaaccccgccgcuuacauuaaaccuggcuccgccaauaagcccaaagacgaacucgauuacgcuaacgacaucgagaagaagauuuguaaaauggaaaagugcagcgccgcguaugagccgucugauaaacauaucaaggaguaccugaauaaaauucagaacucccuugccgcuuaugccaaguucguggcugccuggacccugaaagccgcugcgugaggacuaguuauaagacugacuagcccgaugggccucccaacgggcccuccuccccuccuugcaccgagauuaaucaaaggcucuuuucagagccaccaaaaaaaaaaaaaaaaaaaaaaaaaaaaaaaaaaaaaaaaaaaaaaaaaaaaaaaaaaaaaaaaaaaaaaaaaaaaaaaaaaaaaaaaaaaaaaaaaaaaa

SEQ ID NO: 10053 - RNA, 1242 nt, Artificial Sequence
  mRNA Design i-3 (hSL-A100) comprising derived and/or modified sequence from Pf(3D7)__XP_001351122.1__HsALB_Pf-CSP(19-272)_L(AAY)_Pf-CSP(310-3 27)_L(AAY)_Pf-CSP(346-375)_L(AAY)_PADRE (opt5)
aggagaaagcuuaccaugaagugggugaccuucaucagccugcucuuucuguucuccucugccuacagccuuuuucaggaguaucaaugcuacggcuccucuagcaacacaagaguccugaaugaacucaacuaugacaaugcugggacgaaccuguacaaugagcuugaaaugaacuauuacggaaaacaggagaauugguauucccugaagaaaaacucucggagccucggcgaaaaugaugacgggaacaaugaggauaacgagaagcugcgcaaacccaagcacaagaaacugaagcagccugccgacggaaauccggaucccaacgcgaauccuaacguugaccccaacgcuaauccuaacguggaucccaaugccaacccuaauguggacccgaacgccaaucccaacgcuaauccuaacgccaaucccaacgcuaauccuaacgccaaucccaacgcgaacccgaaugccaacccuaaugcuaaccccaaugccaacccuaaugcuaaccccaaugccaaccccaaugcgaacccuaaugccaacccgaaugcuaaccccaacgccaauccuaacgcuaaucccaacgccaauccuaacgucgaucccaaugccaacccgaaugcuaacccuaaugcgaaccccaaugccaacccuaaugcuaaccccaacgccaauccuaacgccaaucccaacgcuaauccgaacgccaauccuaacgcgaaucccaacgcuaaucccaacgccaauccuaacgccaauccgaacgcuaaucccaacgccaacccuaaugcuaaccccaaugccaacccuaaugcgaaccccgccgcuuacgaaccuuccgacaaacauauuaaggaguaccucaauaaaauccagaacagccuggccgcuuauauuaagcccggcucugccaauaagccgaaagaugaacuugacuacgcgaacgauaucgagaagaaaauuuguaagauggagaaaugcuccgccgcuuaugccaaguucguggcugccuggacccugaaagccgcugcgugaggacuaguuauaagacugacuagcccgaugggccucccaacgggcccuccuccccuccuugcaccgagauuaaucaaaggcucuuuucagagccaccaaaaaaaaaaaaaaaaaaaaaaaaaaaaaaaaaaaaaaaaaaaaaaaaaaaaaaaaaaaaaaaaaaaaaaaaaaaaaaaaaaaaaaaaaaaaaaaaaaaaa

SEQ ID NO: 10054 - RNA, 1296 nt, Artificial Sequence
  mRNA Design i-3 (hSL-A100) comprising derived and/or modified sequence from Pf(3D7)__XP_001351122.1__HsALB_Pf-CSP(19-272)_L(AAY)_Pf-CSP(310-3 27)_L(AAY)_Pf-CSP(346-375)_L(AAY)_PADRE_L(AAY)_P2 (opt5)
aggagaaagcuuaccaugaagugggugaccuucaucagccugcucuuucuguucuccucugccuacagccuuuuucaggaguaucaaugcuacggcuccucuagcaacacaagaguccugaaugaacucaacuaugacaaugcugggacgaaccuguacaaugagcuugaaaugaacuauuacggaaaacaggagaauugguauucccugaagaaaaacucucggagccucggcgaaaaugaugacgggaacaaugaggauaacgagaagcugcgcaaacccaagcacaagaaacugaagcagccugccgacggaaauccggaucccaacgcgaauccuaacguugaccccaacgcuaauccuaacguggaucccaaugccaacccuaauguggacccgaacgccaaucccaacgcuaauccuaacgccaaucccaacgcuaauccuaacgccaaucccaacgcgaacccgaaugccaacccuaaugcuaaccccaaugccaacccuaaugcuaaccccaaugccaaccccaaugcgaacccuaaugccaacccgaaugcuaaccccaacgccaauccuaacgcuaaucccaacgccaauccuaacgucgaucccaaugccaacccgaaugcuaacccuaaugcgaaccccaaugccaacccuaaugcuaaccccaacgccaauccuaacgccaaucccaacgcuaauccgaacgccaauccuaacgcgaaucccaacgcuaaucccaacgccaauccuaacgccaauccgaacgcuaaucccaacgccaacccuaaugcuaaccccaaugccaacccuaaugcgaaccccgccgcuuacgaaccuuccgacaaacauauuaaggaguaccucaauaaaauccagaacagccuggccgcuuauauuaagcccggcucugccaauaagccgaaagaugaacuugacuacgcgaacgauaucgagaagaaaauuuguaagauggagaaaugcuccgccgcuuaugccaaguucguggcugccuggacccugaaagccgcugcggccgcuuaccaauauaucaaggccaauagcaaguuuaucgggauuacagaacucugaggacuaguuauaagacugacuagcccgaugggccucccaacgggcccuccuccccuccuugcaccgagauuaaucaaaggcucuuuucagagccaccaaaaaaaaaaaaaaaaaaaaaaaaaaaaaaaaaaaaaaaaaaaaaaaaaaaaaaaaaaaaaaaaaaaaaaaaaaaaaaaaaaaaaaaaaaaaaaaaaaaaa

SEQ ID NO: 10055 - RNA, 1260 nt, Artificial Sequence
  mRNA Design i-3 (hSL-A100) comprising derived and/or modified sequence from Pf(3D7)__XP_001351122.1__HsALB_Pf-CSP(19-272)_L(AAY)_Pf-CSP(310-3 27)_Linker (AAY)_Pf-CSP(346-397) (opt5)
aggagaaagcuuaccaugaagugggugaccuucaucagccugcucuuucuguucuccucugccuacagccuuuuucaggaguaucaaugcuacggcuccucuagcaacacaagaguccugaaugaacucaacuaugacaaugcugggacgaaccuguacaaugagcuugaaaugaacuauuacggaaaacaggagaauugguauucccugaagaaaaacucucggagccucggcgaaaaugaugacgggaacaaugaggauaacgagaagcugcgcaaacccaagcacaagaaacugaagcagccugccgacggaaauccggaucccaacgcgaauccuaacguugaccccaacgcuaauccuaacguggaucccaaugccaacccuaauguggacccgaacgccaaucccaacgcuaauccuaacgccaaucccaacgcuaauccuaacgccaaucccaacgcgaacccgaaugccaacccuaaugcuaaccccaaugccaacccuaaugcuaaccccaaugccaaccccaaugcgaacccuaaugccaacccgaaugcuaaccccaacgccaauccuaacgcuaaucccaacgccaauccuaacgucgaucccaaugccaacccgaaugcuaacccuaaugcgaaccccaaugccaacccuaaugcuaaccccaacgccaauccuaacgccaaucccaacgcuaauccgaacgccaauccuaacgcgaaucccaacgcuaaucccaacgccaauccuaacgccaauccgaacgcuaaucccaacgccaacccuaaugcuaaccccaaugccaacccuaaugcgaaccccgccgcuuacgaaccuuccgacaaacauauuaaggaguaccucaauaaaauccagaacagccuggccgcuuauauuaagcccggcucugccaauaagccgaaagaugaacuugacuacgcgaacgauaucgagaagaaaauuuguaagauggagaaaugcuccagcguguucaauguugugaacucuuccaucgggcugaucaugguccucagcuuucuguuccuuaauugaggacuaguuauaagacugacuagcccgaugggccucccaacgggcccuccuccccuccuugcaccgagauuaaucaaaggcucuuuucagagccaccaaaaaaaaaaaaaaaaaaaaaaaaaaaaaaaaaaaaaaaaaaaaaaaaaaaaaaaaaaaaaaaaaaaaaaaaaaaaaaaaaaaaaaaaaaaaaaaaaaaaa

SEQ ID NO: 10056 - RNA, 1860 nt, Artificial Sequence
  mRNA Design i-3 (hSL-A100) comprising derived and/or modified sequence from Pf(3D7)__XP_001351122.1__LumSynt_L(GGS4-GGG)_Pf-CSP(19-397) (opt6)
aggagaaagcuuaccaugcaaauauacgaaggaaaacuaacagcagaaggauuacgauucggcauaguagcaucaagguucaaccacgcauuaguagauagacuaguagaaggagcaauagacgcaauaguccgacauggaggacgagaagaagauauaacacuagucagaguaccagggagcugggaaaucccaguagcagcaggagaacucgcaagaaaagaagauaucgacgccguaaucgcaaucgggguacuaauaagaggcgcaacaccccauuucgacuacauagcaagcgaaguaucaaaaggauuagcagaccuaaguuuagaacuaagaaaaccuauuacauucggcgucauaacggcagacacauuagaacaagccaucgaaagagcaggaacaaaacacggaaacaaaggcugggaagcagcacuaagcgcaauugaaauggcaaauuuauucaaaucccuaagaggcggcucagguggcaguggaggaucaggaggaucaggaggaggccuauuccaagaauaucaaugcuacggaucgagcucgaauacacgcguauuaaacgaauuaaacuacgacaacgcaggaacaaaccuauacaacgaacuagaaaugaacuauuauggaaaacaagagaacugguacucccuaaaaaaaaacagucgaagcuuaggagaaaaugacgacggaaauaacgaagacaacgaaaaacuaagaaaacccaaacauaaaaaauuaaaacaacccgcugacggaaacccagacccaaacgcuaacccgaacguugauccaaaugcaaacccaaauguggauccaaaugcaaaccccaacguagauccaaaugcaaacccaaacgcaaaccccaaugccaacccaaacgccaacccuaaugcuaauccaaacgcaaacccaaacgcaaacccgaacgcaaauccaaacgcaaacccuaaugcuaacccaaaugcaaauccaaacgcaaacccaaacgcuaacccaaacgcaaacccaaaugcaaacccaaaugcaaacccaaacgcaaauccaaacguagacccaaacgcaaauccaaacgcaaauccaaacgcaaacccaaacgccaaccccaaugcaaauccgaacgcaaacccaaacgcaaacccaaacgcaaacccaaacgcaaacccaaaugccaacccaaacgcaaacccgaacgcaaacccaaacgcaaacccaaacgcaaacccuaaugcgaacccaaaugccaacccaaacgcaaaccccaacgcuaacccaaacaaaaacaaucaaggaaacggacaagggcacaacaugccaaacgauccaaacagaaaugucgacgaaaacgccaaugcaaacagugccguaaaaaauaauaacaacgaagaaccuucagacaaacacauaaaagaauacuuaaacaaaauacaaaacucauuaucaaccgaauggagcccauguucuguuacaugcggaaauggaauacaaguaagaauaaaaccaggaucagcaaacaaaccaaaagacgaauuagacuacgcaaaugauauagaaaaaaaaauaugcaagauggaaaaaugcaguucuguauuuaacguaguaaacagcucaauaggucuaauaaugguacuauccuuucuuuuccugaacuaaggacuaguuauaagacugacuagcccgaugggccucccaacgggcccuccuccccuccuugcaccgagauuaaucaaaggcucuuuucagagccaccaaaaaaaaaaaaaaaaaaaaaaaaaaaaaaaaaaaaaaaaaaaaaaaaaaaaaaaaaaaaaaaaaaaaaaaaaaaaaaaaaaaaaaaaaaaaaaaaaaaaa

SEQ ID NO: 10057 - RNA, 1722 nt, Artificial Sequence
  mRNA Design i-3 (hSL-A100) comprising derived and/or modified sequence from Pf(3D7)__XP_001351122.1__HsALB_Pf-CSP(19-272)_L(PVTN)_HBsAg (opt6)
aggagaaagcuuaccaugaaauggguaaccuucaucucacuauuauucuuauuuucaucugcauacucacucuuccaagaauaccaaugcuacgguucaucuucuaacacaagaguacuaaacgaacuaaacuacgacaacgcaggaacaaaccucuauaacgaacuugaaaugaacuacuauggaaaacaagaaaacugguauucccuaaaaaaaaacucaagauccuuaggagaaaacgacgacggaaauaacgaagacaacgaaaaacuaagaaaaccaaaacacaaaaaacuaaaacaacccgcagacggaaacccagacccaaacgcaaacccaaacguagacccaaacgcaaacccaaacgucgacccaaacgccaauccaaacguagacccaaacgcuaacccaaacgccaauccaaacgcaaauccaaaugccaacccaaacgcaaacccaaaugcgaauccaaaugcaaaccccaaugcaaacccaaacgcaaauccaaacgcaaacccaaacgcaaacccuaacgcaaauccaaaugcaaacccuaacgcaaacccaaacgcaaauccaaacgcaaacccaaaugcaaauccaaacgucgacccaaacgcaaacccgaacgcaaacccaaacgcaaacccaaaugcaaauccaaaugcaaaccccaaugcaaacccaaacgcaaacccaaacgcuaacccaaaugcaaacccaaacgcaaacccaaacgcaaauccaaacgcaaacccaaacgcaaacccaaaugcaaacccaaacgcaaaccccaaugcaaauccaaacgcaaacccaaacgcaaacccacccguaaccaacauggaaaacaucacaucaggauuccuuggaccccucuuaguacuucaagcaggauucuuccuauuaacaagaauacuaacaauaccucaaucuuuagauucaugguggacuucauuaaauuuccuaggaggaagcccaguaugcuuaggacaaaacagccaaucaccaaccucaaaccacucaccaaccucaugcccaccaauaugcccaggauaccgauggaugugccuaagaagauucauaauauucuuauucauacuacuacuaugccucauauucuuacuaguacuauuagacuaccaaggaaugcugccagucugcccacuuauaccagguagcaccaccacuaacacaggaccuugcaaaacaugcacaacacccgcucaaggaaauucuauguuuccaucaugcugcugcacuaaacccacagauggcaauuguacaugcauaccaauccccucaucaugggcauuugccaaauacuuaugggaaugggcaucuguaagauucucuuggcuaucacucuuaguaccauucguacaaugguucguaggccuauccccuacaguauggcuauccgcaauauggaugaugugguacuggggaccaucacuauacucaauagucucacccuucauaccacuauuaccaauauucuucugccuauggguauauauauaaggacuaguuauaagacugacuagcccgaugggccucccaacgggcccuccuccccuccuugcaccgagauuaaucaaaggcucuuuucagagccaccaaaaaaaaaaaaaaaaaaaaaaaaaaaaaaaaaaaaaaaaaaaaaaaaaaaaaaaaaaaaaaaaaaaaaaaaaaaaaaaaaaaaaaaaaaaaaaaaaaaaa

SEQ ID NO: 10058 - RNA, 1839 nt, Artificial Sequence
  mRNA Design i-3 (hSL-A100) comprising derived and/or modified sequence from Pf(3D7)__XP_001351122.1__HsALB_Pf-CSP(19-272)_L(AAY)_Pf-CSP(346-3 65)_L(AAY)_PADRE_L(PVTN)_HBsAg (opt6)
aggagaaagcuuaccaugaaaugggucaccuucauuuccuuauuauucuuauuuucguccgcauacucacuauuucaagaauaucaauguuacggaucaagcucaaacacccgcguacucaacgaacuaaacuacgacaacgcaggaacaaaccuauauaacgaacuagaaaugaauuauuacggaaaacaagaaaacugguauucacuuaaaaaaaacuccagaucccuuggcgaaaacgacgacggaaauaaugaagacaacgaaaaacuuagaaaaccaaaacauaaaaaacuaaaacaaccugcagacgguaacccagauccaaaugcuaacccaaauguagacccuaacgcuaacccaaacguagauccaaacgccaacccaaacguagauccaaacgcaaacccaaacgcaaauccaaaugcaaacccaaacgccaaccccaacgcaaacccaaaugcaaauccuaaugcaaaucccaacgcaaauccaaacgcaaauccaaaugcaaaccccaacgcaaacccaaaugcaaauccaaaugcaaauccaaaugcaaacccaaacgcaaacccaaaugcaaauccuaacgcaaacccaaacgucgaccccaacgcaaauccaaacgcaaacccaaacgcaaaccccaaugcaaacccaaaugcaaacccaaacgcaaacccaaacgcaaaccccaacgcaaauccaaacgcaaauccaaaugcaaauccaaacgcaaaccccaaugcaaaccccaaugcuaacccaaacgccaaucccaacgcaaacccaaacgcaaaucccaacgcaaauccaaacgcaaacccugcagcauacauaaaacccggcucugcuaauaaacccaaagaugaacucgacuaugccaacgacauagaagcagccuacgcaaaauucguagcugcauggacauuaaaagcagcagcaccagugacaaacauggaaaacauuacaucaggauucuuagguccauuauuaguccuccaagcaggauucuucuuacuaacuagaauauuaacaauaccacaaucccuagacucuugguggacuucacuaaauuuccuaggaggauccccaguaugucucggucaaaauucucaaucaccuacaucaaaccauucaccaacaagcugccccccaaucugucccggauacagauggaugugccuacgcagauucauuauauuucuauucauacuacuucuaugccuaauauuccuacuaguccuucuagacuaccaaggaaugcuacccguaugcccacuuauaccaggauccacaacaacaaacacagguccaugcaaaacaugcacaacaccagcccaagguaauucuauguucccaucaugcuguugcacaaaaccaacagacgguaacugcacaugcaucccaauacccucaucaugggcauucgcaaaauaccuaugggaaugggcuucaguaagauucuccugguuaucccuuuuagucccauucguacaaugguucguaggauuaucacccacuguauggcuaucagcaauauggaugaugugguauuggggcccaucucuuuacucaaucgucuccccuuuuauuccacuacuacccauauuuuucugccuauggguauacauuuaaggacuaguuauaagacugacuagcccgaugggccucccaacgggcccuccuccccuccuugcaccgagauuaaucaaaggcucuuuucagagccaccaaaaaaaaaaaaaaaaaaaaaaaaaaaaaaaaaaaaaaaaaaaaaaaaaaaaaaaaaaaaaaaaaaaaaaaaaaaaaaaaaaaaaaaaaaaaaaaaaaaaa

SEQ ID NO: 10059 - RNA, 2058 nt, Artificial Sequence
  mRNA Design i-3 (hSL-A100) comprising derived and/or modified sequence from Pf(3D7)__XP_001351122.1__HsALB_Pf-CSP(19-384)_L(PVTN)_HBsAg (opt6)
aggagaaagcuuaccaugaaauggguaaccuucauaucucucuuauuccuuuuuucaucugcauauucacuauuucaagaauaucaauguuauggaucaucaucaaacacccgaguacucaacgaauuaaauuacgacaacgcagguacuaacuuauacaacgaauuagaaaugaauuacuauggaaaacaagaaaacugguauucccucaaaaaaaacucucgaucucuaggcgaaaacgacgacggcaacaacgaagacaacgaaaaacuacguaaacccaaacacaaaaaacuaaaacaaccagcagauggaaacccagacccaaacgcaaacccaaacguagacccaaacgcaaauccaaacguagacccgaacgcaaauccaaauguagaucccaaugcuaauccaaaugccaacccaaacgcaaacccuaacgcuaaucccaacgcaaacccaaacgcaaacccaaaugcaaacccaaacgcaaaccccaacgcaaacccaaaugcaaauccaaaugcaaauccaaacgccaacccaaaugccaacccaaacgcaaauccaaacgcuaaccccaacgcaaaccccaacgccaaucccaacguagaccccaacgcaaacccaaaugcaaauccaaacgcaaaccccaaugcaaacccaaacgcuaacccuaaugcaaacccaaacgccaacccaaaugcaaaccccaacgccaacccaaacgcaaauccaaacgcaaacccaaacgcuaacccaaacgccaacccaaacgcaaacccaaacgcuaacccaaacgcaaacccaaaugcaaacccaaaugcuaauccaaauaaaaacaaccaaggaaacggccaaggacauaauaugccuaacgacccaaacagaaacguagacgaaaaugcaaacgcaaacuccgcaguaaaaaauaacaauaacgaagaacccuccgacaaacauauaaaagaauaucuaaacaaaauacaaaauucacucucuacugaaugguccccaugcucaguaacauguggaaacggaauccaaguacgcauaaaaccaggaucagcaaacaaaccaaaagacgaacuagacuacgcaaacgauauagaaaaaaaaauaugcaaaauggaaaaaugcuccuccguauucaacguagucaauucaucuccaguaaccaauauggaaaauauaaccuccggauuccuaggaccacuacucguuuuacaagcaggauucuucuuacuaacaagaauacucacuauaccacaaucccuggauucuugguggacaucccuaaauuucuuaggcggaucacccguaugccuaggccaaaauagccaaaguccaacuucaaaccacuccccaacuucuugcccaccaauaugccccggcuacagauggaugugccuucgacgauucauaauauuucuauucauacuauuacuaugucuaauauuccuacucguucuauuagacuaccaaggaauguuaccaguuugcccacuaauaccugguucaacaaccacuaacacuggucccugcaaaacauguaccaccccagcccaaggaaacucaauguuccccucaugcuguugcacaaaaccaaccgacggaaauugcacaugcauacccauaccaucuucuugggcauuugcuaaauaucuaugggaaugggcaucaguacgcuucucauggcuaucucuacuaguaccauucguccaaugguucguaggccuaucaccaacaguauggcuaucugcaauauggaugaugugguacuggggucccuccuuauauucaauuguaucaccuuuuaucccacuccuacccauauucuucuguuuauggguauacauauaaggacuaguuauaagacugacuagcccgaugggccucccaacgggcccuccuccccuccuugcaccgagauuaaucaaaggcucuuuucagagccaccaaaaaaaaaaaaaaaaaaaaaaaaaaaaaaaaaaaaaaaaaaaaaaaaaaaaaaaaaaaaaaaaaaaaaaaaaaaaaaaaaaaaaaaaaaaaaaaaaaaaa

SEQ ID NO: 10060 - RNA, 1875 nt, Artificial Sequence
  mRNA Design i-3 (hSL-A100) comprising derived and/or modified sequence from Pf(3D7)__XP_001351122.1__HsALB_Pf-CSP(19-384)_L(SGG)_Ferritin (opt6)
aggagaaagcuuaccaugaaauggguaacauuuauaucucuauuauucuuauucuccucagcauacucacucuuucaagaauaccaaugcuacgguucuucauccaacacacgaguccuaaacgaauuaaacuacgacaaugcaggaaccaaucuauacaaugaacuugaaaugaacuacuacggaaaacaagaaaacugguacucccuaaaaaaaaacucacgaagccuaggagaaaaugacgacggaaacaacgaagacaacgaaaaacuacgaaaacccaaacacaaaaaacuaaaacaacccgccgacggcaauccagauccaaacgcaaacccaaacguagaccccaacgccaacccaaacguagauccaaacgcaaauccaaauguugauccaaaugcaaaccccaacgcaaacccaaacgcaaacccaaacgcaaacccaaacgcaaacccaaacgcaaauccaaaugcaaaucccaacgcaaauccaaacgcaaauccaaaugcaaacccaaacgcuaaucccaacgcuaacccaaacgcaaacccaaacgcaaacccgaacgcuaacccaaacgcaaacccaaacgcaaaccccaacguagacccaaacgcaaacccaaacgcaaaccccaacgcaaacccaaacgcaaacccaaacgcaaaccccaacgcaaaccccaacgcaaacccaaacgccaaccccaaugcaaacccaaacgccaacccaaacgcaaacccaaacgcaaacccaaacgcaaacccaaacgcaaauccaaacgcaaacccaaacgcaaacccaaacgcaaacccaaaugcaaacccaaacaaaaacaaccaaggaaauggacaaggacacaacaugccaaacgacccaaaccguaacguagaugaaaaugccaacgcaaacucagccguaaaaaacaacaacaacgaagaaccuucagacaaacacauaaaagaauacuuaaacaaaauacaaaacucauuaucaacugaauggucccccuguucagucacaugcggaaauggaauacaaguaagaauuaaaccagguucagccaacaaaccaaaagacgaacuagacuacgcaaacgacauugaaaaaaaaauauguaaaauggaaaaauguaguucagucuucaacguaguaaacucaucauccggaggauuauccaaagacauaauaaaacucuuaaaugaacaaguaaacaaagaaaugaacucgagcaaccucuauaugucaaugucauccuggugcuacacccauucccuagacggcgccggacuauuccuguucgaccaugcagcagaagaauaugaacacgcaaaaaagcuaaucaucuucuuaaacgaaaacaaugucccaguacaacuaaccuccauaucagcaccugaacauaaauucgaaggacuaacacaaauauuucaaaaagcauacgaacacgaacaacacauaucagaaucaauuaauaacauaguagaccacgcaaucaaaagcaaggaccacgcaacauucaacuuucuacaaugguacguagcagaacaacaugaagaagaaguacucuucaaagacaucuuagacaaaauugaacucauaggaaacgaaaaucacggacucuaccucgcagaccaguacguaaaaggaaucgcaaaaucacguaaaagcuaaggacuaguuauaagacugacuagcccgaugggccucccaacgggcccuccuccccuccuugcaccgagauuaaucaaaggcucuuuucagagccaccaaaaaaaaaaaaaaaaaaaaaaaaaaaaaaaaaaaaaaaaaaaaaaaaaaaaaaaaaaaaaaaaaaaaaaaaaaaaaaaaaaaaaaaaaaaaaaaaaaaaa

SEQ ID NO: 10061 - RNA, 1836 nt, Artificial Sequence
  mRNA Design i-3 (hSL-A100) comprising derived and/or modified sequence from Pf(3D7)__XP_001351122.1__HsALB_Pf-CSP(93-384)_L(PVTN)_HBsAg (opt6)
aggagaaagcuuaccaugaaauggguaacuuuuauaucccuccuauuucuauuuucaucagccuauucaaaacuaaaacaacccgcagauggaaaucccgacccaaaugcaaauccaaauguagauccaaacgccaacccaaaugucgacccaaaugcaaacccaaacguagauccuaacgcaaacccaaaugcuaauccaaacgcuaacccaaacgcaaauccaaaugcuaacccaaacgcaaacccuaacgcaaacccaaacgcuaacccaaacgcaaacccaaacgccaacccaaacgcaaaccccaacgcaaacccuaacgcaaacccaaacgcaaacccaaaugccaacccaaacgcaaacccaaacgcaaacccaaacguagaccccaacgcuaauccaaaugcaaauccaaacgcaaacccaaaugccaacccaaacgccaacccuaaugcaaacccaaacgcaaacccaaaugcaaaccccaacgcaaauccaaacgcaaauccaaaugcaaacccaaacgcuaacccaaacgcaaaccccaaugcaaacccaaacgcaaauccaaaugcaaacccaaaugcaaauccaaaugcaaacccaaauaaaaacaaccaaggaaacggacaaggccauaacaugccaaacgacccaaaccgcaacgucgaugaaaacgccaacgcaaauucagcgguuaaaaacaacaacaaugaagaacccucagacaaacacauaaaagaauacuuaaacaaaauacaaaacucacuaucgacagaaugguccccaugcuccguaaccugcgguaauggaauacaagucagaauaaaaccaggaucagcuaauaaaccaaaagacgaauuagacuacgcaaacgacauagaaaagaaaauaugcaaaauggaaaaauguucuucaguauuuaacguagucaacucaucacccguaacuaacauggaaaacauaaccucaggauuucuagguccuuuacucguacuacaagcaggauuuuuccuacuuacccgaauccuaacaauaccucaaucucuagacucaugguggacaucccuaaauuucuuaggcggaucaccaguuugccucggacaaaacucucaaucaccaacuucaaaucacuccccaacaucuugcccaccaauaugcccaggauaucgauggaugugucuacgacguuuuauaauauuucuauuuauacuacuacucugucuaauauuccuauuaguacuacucgacuaucaaggaaugcuccccgucuguccccucauacccggaucaacaacuacaaacaccggaccgugcaaaaccugcacaaccccagcucaaggaaauucaauguucccaucaugcugcuguacaaaaccaacagauggaaacugcacaugcauaccaaucccaucaagcugggccuuugccaaauauuuaugggaaugggccuccgucagauucucauggcucucccuucuaguuccauucguacaaugguuuguaggccuauccccaaccguauggcuauccgccauauggaugaugugguauuggggaccaucacuauacucaauaguauccccauucauaccacuccuacccauauucuuuugccuauggguauacauuuaaggacuaguuauaagacugacuagcccgaugggccucccaacgggcccuccuccccuccuugcaccgagauuaaucaaaggcucuuuucagagccaccaaaaaaaaaaaaaaaaaaaaaaaaaaaaaaaaaaaaaaaaaaaaaaaaaaaaaaaaaaaaaaaaaaaaaaaaaaaaaaaaaaaaaaaaaaaaaaaaaaaaa

SEQ ID NO: 10062 - RNA, 1497 nt, Artificial Sequence
  mRNA Design i-3 (hSL-A100) comprising derived and/or modified sequence from Pf(3D7)__XP_001351122.1__HsALB_Pf-CSP(199-377)_L(PVTN)_HBsAg (opt6)
aggagaaagcuuaccaugaaauggguaacauucauaucauuacucuucuuauuuuccucugcauacucagauccaaaugcaaacccaaaugcaaacccaaacgcaaacccaaaugccaauccaaaugcaaacccaaaugcaaacccaaacgcaaacccaaacgcaaacccaaacgcaaacccuaaugcaaacccaaaugcaaauccaaacgcuaacccaaacgcaaacccaaaugccaacccaaacgccaauccaaacgcaaacccaaacgcaaaucccaaugcaaacccuaacaaaaacaaucaaggaaacggacaaggccacaacaugccaaaugacccaaaccgcaauguagacgaaaaugccaacgcaaacuccgcuguaaaaaacaauaacaacgaagaaccuuccgauaaacauauaaaagaauacuuaaauaaaauacaaaauucauuaucaacagaauggucaccaugcucagucacaugcggaaauggaauacaaguaagaauaaaacccgguuccgcaaacaaaccaaaagacgaacuagacuacgcaaaugacaucgaaaaaaaaauaugcaaaauggaaaaauguucuucaguaccaguaacaaacauggaaaacaucaccucuggauuccuaggaccacuauuaguacuacaagcaggauucuuccuccuaacaagaauauuaacaauaccacaaucacuugacucaugguggacaucccucaauuuccuaggaggauccccaguaugucuaggucaaaacucucaaucuccaacauccaaccauucacccacaucaugcccucccauaugcccaggauaccgauggaugugccucagaagauucauaauauuccuauucauauuacuccuauguuuaaucuuucuacuagucuuauuagacuaccaaggaaugcuaccaguaugcccacuaaucccaggauccacaacaacaaacacaggccccugcaaaacauguacaacaccagcacaaggaaacucaauguucccaucaugcuguugcacaaaaccaacagacggaaacugcacaugcaucccaauaccaucaucuugggcauuugcaaaauacuuaugggaaugggcaucaguacgcuuuucauggcucucccuccucguaccauucguccaaugguucguaggucuaucaccaacaguuuggcuauccgcuauauggaugaugugguauuggggcccuucccuauacucaauaguuucaccauuuauaccacuccuaccaauauuuuucugccuuuggguauacauauaaggacuaguuauaagacugacuagcccgaugggccucccaacgggcccuccuccccuccuugcaccgagauuaaucaaaggcucuuuucagagccaccaaaaaaaaaaaaaaaaaaaaaaaaaaaaaaaaaaaaaaaaaaaaaaaaaaaaaaaaaaaaaaaaaaaaaaaaaaaaaaaaaaaaaaaaaaaaaaaaaaaaa

SEQ ID NO: 10063 - RNA, 1194 nt, Artificial Sequence
  mRNA Design i-3 (hSL-A100) comprising derived and/or modified sequence from Pf(3D7)__XP_001351122.1__HsALB_Pf-CSP(19-272)_L(AAY)_Pf-CSP(346-3 75)_L(AAY)_Pf-CSP(310-327) (opt6)
aggagaaagcuuaccaugaaauggguaaccuucauuucacuucucuuccuauucuccagcgcauacucacucuuccaagaauaccaaugcuacggcucaaguuccaacacacgaguacuaaacgaauuaaacuacgacaaugcuggaaccaaccuauacaacgaacucgaaaugaacuacuacgguaaacaagaaaacugguauucacuaaaaaaaaacucaaggucccuaggagaaaacgacgacggaaacaacgaagacaacgaaaaauuaagaaaaccaaaacacaaaaaacuaaaacaacccgcagacggaaaccccgacccaaacgcaaacccaaacguagauccaaacgcaaacccaaacguagacccaaacgcaaacccaaacguagacccaaacgcaaacccuaaugcaaacccaaacgcaaacccaaacgcaaacccaaacgcaaacccaaacgcaaacccaaacgcaaaccccaacgccaacccaaacgcaaacccaaacgcaaacccaaacgcaaacccaaacgcaaacccaaacgcaaacccaaacgcaaacccaaacgcaaacccaaaugcaaacccaaacgcaaacccaaacguagacccaaacgcaaacccaaacgcaaacccaaaugcaaacccaaacgcaaacccaaacgcaaacccaaacgcuaacccaaacgcaaacccaaacgcuaauccaaaugcuaaccccaacgcaaacccaaaugcaaacccaaacgcuaauccaaaugcaaauccaaacgcaaacccaaacgcaaacccaaacgcaaacccaaacgcaaacccaaacgcaaauccagccgcauacauaaaacccggcucagcaaacaaaccaaaagacgaacuagacuacgccaacgacauagaaaaaaaaauaugcaaaauggaaaaaugcucagccgcauacgaaccaucagacaaacacaucaaagaauacuuaaacaaaauacaaaacagcuuauaaggacuaguuauaagacugacuagcccgaugggccucccaacgggcccuccuccccuccuugcaccgagauuaaucaaaggcucuuuucagagccaccaaaaaaaaaaaaaaaaaaaaaaaaaaaaaaaaaaaaaaaaaaaaaaaaaaaaaaaaaaaaaaaaaaaaaaaaaaaaaaaaaaaaaaaaaaaaaaaaaaaaa

SEQ ID NO: 10064 - RNA, 1242 nt, Artificial Sequence
  mRNA Design i-3 (hSL-A100) comprising derived and/or modified sequence from Pf(3D7)__XP_001351122.1__HsALB_Pf-CSP(19-272)_L(AAY)_Pf-CSP(346-3 75)_L(AAY)_Pf-CSP(310-327)_L(AAY)_PADRE (opt6)
aggagaaagcuuaccaugaaauggguaacauucauaucacuacuauuccuauucucauccgccuacucacucuuucaagaauaucaaugcuacggaucaagcucaaauacaagaguacuaaacgaacuaaacuacgacaacgcaggaaccaaccuauacaacgaacuagaaaugaacuacuacggaaaacaagaaaacugguacucacuuaaaaaaaacucaagaucacuaggagaaaacgacgacggaaacaacgaagacaacgaaaaacuacgaaaaccaaaacauaaaaaacuaaaacaaccagcagacggaaacccagacccaaacgcaaauccaaacguagacccaaaugcaaacccaaacguagacccaaacgcaaacccaaacguagacccaaaugcaaacccaaacgcaaauccaaacgcaaacccaaacgcaaacccaaacgcaaacccaaacgcaaacccaaacgcaaacccaaaugcaaauccaaacgcaaacccaaaugcaaacccaaacgcaaacccaaacgcgaacccaaacgccaaccccaacgcaaacccaaacgcaaauccaaaugcaaacccaaacgccaauccaaacguagacccaaacgcaaauccaaacgcaaacccaaacgcaaacccaaacgcaaacccuaacgcaaacccaaacgcaaacccaaacgcaaacccaaacgccaacccaaacgcaaaccccaacgcaaacccaaacgcaaacccaaacgcaaaccccaacgcaaauccaaacgcuaacccaaacgcuaaccccaacgcaaacccaaaugcaaacccaaacgccaacccagccgcauacauaaaaccaggaucagcaaauaaaccaaaagacgaacuagacuacgcaaacgacauagaaaaaaaaauaugcaaaauggaaaaaugcuccgcagcauacgaaccaucagacaaacacaucaaagaauaccuaaacaaaauccaaaacucacuagccgccuacgcaaaauuugucgcagcauggacacucaaagcagcagcauaaggacuaguuauaagacugacuagcccgaugggccucccaacgggcccuccuccccuccuugcaccgagauuaaucaaaggcucuuuucagagccaccaaaaaaaaaaaaaaaaaaaaaaaaaaaaaaaaaaaaaaaaaaaaaaaaaaaaaaaaaaaaaaaaaaaaaaaaaaaaaaaaaaaaaaaaaaaaaaaaaaaaa

SEQ ID NO: 10065 - RNA, 1242 nt, Artificial Sequence
  mRNA Design i-3 (hSL-A100) comprising derived and/or modified sequence from Pf(3D7)__XP_001351122.1__HsALB_Pf-CSP(19-272)_L(AAY)_Pf-CSP(310-3 27)_L(AAY)_Pf-CSP(346-375)_L(AAY)_PADRE (opt6)
aggagaaagcuuaccaugaaauggguaaccuucauaucccuacuauuucuauucuccucagcauacucacuauuccaagaauaccaaugcuacggcucaucaucaaacacaagaguacuaaaugaacuaaacuacgacaacgccggaaccaaccuauacaaugaacucgaaaugaauuacuacggaaaacaagaaaacugguacucacuaaaaaaaaacucaagaagccuaggagaaaacgacgacggaaacaacgaagacaacgaaaaauuacgaaaaccaaaacauaaaaaacuaaaacaacccgccgacggaaacccagacccaaacgcaaacccaaacguagacccaaacgcaaauccaaacguagacccaaacgcaaauccaaauguagacccaaacgcaaacccaaacgcaaacccaaacgcaaacccaaacgcaaacccgaacgcaaauccaaacgcaaacccaaacgcaaacccaaacgcaaacccaaacgcaaacccaaacgcaaaccccaacgcaaacccaaaugcaaacccaaacgcaaacccaaaugcaaauccaaacgcaaacccaaacgcaaacccaaacgcaaacccaaacguagacccaaaugcaaaccccaacgcaaacccaaacgcaaacccaaacgcaaacccaaacgcaaacccaaacgcaaacccaaacgcaaacccaaacgcaaacccaaacgccaauccaaacgcaaauccaaacgcaaacccaaacgcaaacccaaacgcaaacccaaacgcaaacccaaacgcaaacccaaacgcaaacccaaaugcaaacccaaacgcaaacccagcagcauacgaaccuucagacaaacacauaaaagaauacuuaaacaaaauacaaaacucacuagcagccuacaucaaaccaggauccgcaaacaaaccaaaagacgaacuagacuacgcaaacgacauagaaaaaaaaauauguaaaauggaaaaaugcucagccgcauaugcuaaauucgucgcagcauggaccuuaaaagcagcagcauaaggacuaguuauaagacugacuagcccgaugggccucccaacgggcccuccuccccuccuugcaccgagauuaaucaaaggcucuuuucagagccaccaaaaaaaaaaaaaaaaaaaaaaaaaaaaaaaaaaaaaaaaaaaaaaaaaaaaaaaaaaaaaaaaaaaaaaaaaaaaaaaaaaaaaaaaaaaaaaaaaaaaa

SEQ ID NO: 10066 - RNA, 1296 nt, Artificial Sequence
  mRNA Design i-3 (hSL-A100) comprising derived and/or modified sequence from Pf(3D7)__XP_001351122.1__HsALB_Pf-CSP(19-272)_L(AAY)_Pf-CSP(310-3 27)_L(AAY)_Pf-CSP(346-375)_L(AAY)_PADRE_L(AAY)_P2 (opt6)
aggagaaagcuuaccaugaaaugggucaccuucaucucacuacuauuuuuauucuccagcgcauacucauuauuccaagaauaccaaugcuauggcucaagcucaaacacaagaguauuaaacgaacuaaacuacgauaacgccggaacaaaccuauacaacgaacucgaaaugaacuacuauggaaaacaagaaaacugguacucacuuaaaaaaaauucaagaucucuaggagaaaacgacgacggaaacaaugaagacaacgagaaauuaagaaaaccaaaacacaaaaaacuaaaacaaccagcagacggaaacccagacccaaacgcaaacccaaacguagacccaaacgcaaacccaaacguagacccaaacgcaaacccaaacguagauccgaacgcaaauccaaacgcaaauccaaacgcaaacccaaaugcaaacccaaaugcaaacccaaaugcaaacccaaacgcaaacccaaacgcaaacccaaacgcaaaccccaacgcaaacccaaacgcaaauccaaacgcaaacccaaacgcaaacccaaacgcaaaccccaacgcaaacccaaacgcaaacccgaacgcgaacccaaacguggauccaaacgcaaacccaaaugcaaaucccaacgcaaacccaaaugcaaacccaaacgcaaacccaaacgcaaacccaaacgcaaacccaaaugcaaacccaaacgcaaacccaaacgcaaacccaaacgcaaacccaaacgcaaauccaaacgcaaauccaaaugcaaacccaaacgcaaacccaaacgcaaaccccaacgcaaauccaaacgcaaacccagccgcauacgaaccaucagacaaacauauaaaagaauaucuaaacaaaauucaaaacucacucgcagcauacauaaaaccaggaagcgcaaacaaaccuaaagacgaacuagacuacgcaaacgacauagaaaaaaaaauaugcaaaauggaaaaaugcucagcagcguacgcaaaauucguagcagcauggacacuaaaagcagcagccgcagcauaccaauacauaaaagcaaauucaaaauucaucggaauuacagaacuauaaggacuaguuauaagacugacuagcccgaugggccucccaacgggcccuccuccccuccuugcaccgagauuaaucaaaggcucuuuucagagccaccaaaaaaaaaaaaaaaaaaaaaaaaaaaaaaaaaaaaaaaaaaaaaaaaaaaaaaaaaaaaaaaaaaaaaaaaaaaaaaaaaaaaaaaaaaaaaaaaaaaaa

SEQ ID NO: 10067 - RNA, 1260 nt, Artificial Sequence
  mRNA Design i-3 (hSL-A100) comprising derived and/or modified sequence from Pf(3D7)__XP_001351122.1__HsALB_Pf-CSP(19-272)_L(AAY)_Pf-CSP(310-3 27)_Linker (AAY)_Pf-CSP(346-397) (opt6)
aggagaaagcuuaccaugaaauggguuacauucauaucauuacuauuccucuuuuccucagcauacucacucuuucaagaauaccaaugcuacggcucauccucaaacacaagaguacucaacgaacucaacuaugacaacgcaggaacaaaccucuacaacgaacuugaaaugaauuacuauggaaaacaagaaaacugguacucauuaaaaaaaaacucaagauccuuaggcgaaaacgacgacggaaacaacgaagacaacgagaaacuccgaaaaccaaaacacaaaaaacuaaaacaaccagcagacggaaacccagacccaaacgcaaacccaaacguagacccaaacgcaaacccaaacguagacccaaacgcaaacccaaacguagacccaaacgcaaacccaaacgcaaacccaaacgcaaacccaaacgcaaacccaaacgcaaacccaaacgcaaacccaaacgcaaacccaaacgcaaacccaaacgcaaacccaaacgcaaacccaaacgccaacccaaacgcaaacccaaacgccaacccaaacgcaaacccaaacgcaaacccaaacgcaaauccaaacgccaacccaaacguagacccaaacgcaaacccaaacgcaaacccaaacgcaaacccaaacgcaaaccccaacgccaacccaaacgccaaccccaacgcaaauccaaacgcaaacccaaacgcaaaccccaacgcaaacccaaacgcaaacccaaacgcaaacccaaacgcuaacccaaacgcaaaccccaacgcaaauccaaacgcaaacccaaacgcaaacccaaaugcaaacccagcagcauaugaaccuucagauaaacacauaaaagaauaccuaaacaaaauccaaaacucucucgcagccuacaucaaaccaggaucagcaaacaaacccaaagacgaacuagacuacgcaaaugauaucgaaaaaaaaauaugcaaaauggaaaaaugcucgagcguauuuaacguaguaaacucaucaaucggacucauaaugguacuaucauuucuauuccucaacuaaggacuaguuauaagacugacuagcccgaugggccucccaacgggcccuccuccccuccuugcaccgagauuaaucaaaggcucuuuucagagccaccaaaaaaaaaaaaaaaaaaaaaaaaaaaaaaaaaaaaaaaaaaaaaaaaaaaaaaaaaaaaaaaaaaaaaaaaaaaaaaaaaaaaaaaaaaaaaaaaaaaaa

SEQ ID NO: 10068 - RNA, 1860 nt, Artificial Sequence
  mRNA Design i-3 (hSL-A100) comprising derived and/or modified sequence from Pf(3D7)__XP_001351122.1__LumSynt_L(GGS4-GGG)_Pf-CSP(19-397) (opt11)
aggagaaagcuuaccaugcaaauauacgagggcaaacucacggcugaaggccuacgcuuuggcaucgucgcaucacgguucaaucacgcacucguggacaggcucguagaaggugccaucgacgcaauaguacgccacggcgggcgcgaagaggacauaacgcuaguacgcguacccggaagcugggaaauccccguagccgcaggcgaacucgcacgcaaagaagacaucgacgccgugaucgcaauaggaguccugauccgaggcgcaacaccacacuucgacuacaucgccuccgaagucucaaaaggccuagcggaucugagccucgaacugcgcaaaccuauaacauucggcgucauaacagccgacacauuagaacaggccauagaaagagccggaaccaaacauggaaacaaaggcugggaagcggcccuaagcgccaucgaaauggcaaaccucuucaaaagccugcgcggaggaucaggcggcagcggcggcuccggaggaagcggcggcggucuuuuucaagaauaccaaugcuacggcuccucaucgaacacacgcguacucaaugaacugaacuacgacaaugcaggaaccaaccucuacaacgaacucgagaugaacuacuacggcaaacaagaaaacugguacucgcuaaagaaaaacuccagaucccugggcgaaaacgacgacggaaacaacgaagacaacgaaaaacuacgcaaaccaaaacacaagaaacuaaaacaaccagcagacggaaacccagacccaaacgcgaacccaaacgucgacccaaacgcaaacccaaacguagacccaaacgcaaacccaaacgucgaccccaacgcaaacccaaacgccaaccccaacgcaaaccccaacgcgaacccaaacgcgaaccccaacgcaaacccaaacgcaaaccccaacgcaaacccaaacgcaaacccaaacgccaacccgaaugccaacccgaacgcaaacccgaacgcaaaccccaacgcgaaccccaacgcaaacccaaaugccaaccccaacgcaaaccccaacguagacccgaacgcaaacccgaacgcaaacccgaacgcaaacccaaacgcaaacccaaacgccaaccccaacgccaacccaaacgcgaacccaaaugcaaaccccaacgccaacccgaacgccaacccaaacgcaaacccgaacgcaaaccccaacgcaaaccccaacgcaaaccccaacgcaaacccgaacgccaacccaaacgcaaacccaaacgcaaacccaaacaaaaacaaccaaggaaacgggcaaggccacaacaugcccaacgacccaaaccgaaauguagaugaaaacgcaaacgccaacagcgcggucaaaaacaacaacaacgaagaacccucggacaaacacauaaaagaauaccuaaacaaaauccagaacucccucucaacagaauggucccccugcucaguuaccugcgguaaugguauacaaguccgcauuaaaccgggaucugccaacaaaccaaaagaugagcuagacuacgccaacgacauagaaaagaaaaucugcaaaauggagaaaugcuccucagucuucaacguaguaaacagcucgauagggcucaucaugguacucuccuuuuuauuccucaacuaaggacuaguuauaagacugacuagcccgaugggccucccaacgggcccuccuccccuccuugcaccgagauuaaucaaaggcucuuuucagagccaccaaaaaaaaaaaaaaaaaaaaaaaaaaaaaaaaaaaaaaaaaaaaaaaaaaaaaaaaaaaaaaaaaaaaaaaaaaaaaaaaaaaaaaaaaaaaaaaaaaaaa

SEQ ID NO: 10069 - RNA, 1722 nt, Artificial Sequence
  mRNA Design i-3 (hSL-A100) comprising derived and/or modified sequence from Pf(3D7)__XP_001351122.1__HsALB_Pf-CSP(19-272)_L(PVTN)_HBsAg (opt11)
aggagaaagcuuaccaugaaaugggucaccuucaucucccuccucuuccucuucuccucugccuacucacucuuccaagaauaccaaugcuacggcuccucuuccaacacccgcguacucaacgaacucaacuaugacaaugcaggaaccaaccuauacaacgagcuagagaugaacuacuacggcaaacaagaaaacugguacucccucaagaaaaacucacgcucccuuggcgaaaaugacgacggcaacaacgaagacaacgaaaaacuucgcaaacccaaacacaagaaauuaaaacaaccagccgacggcaacccagaccccaacgccaaccccaacgucgaccccaacgccaacccuaacgucgaccccaacgcaaacccuaacgucgauccaaacgccaaccccaacgcuaaccccaacgcaaauccgaacgcaaaccccaacgccaacccuaacgccaaccccaacgccaacccaaacgccaaccccaacgcuaaccccaacgcaaacccgaacgccaaccccaacgccaaccccaacgcaaaccccaacgccaaccccaaugcaaaccccaacgccaacccaaaugccaaccccaacgucgaccccaacgcaaaccccaacgcuaacccuaacgcuaacccaaacgccaacccaaacgcuaaccccaacgccaaccccaacgccaaccccaacgcaaacccaaacgcaaacccuaacgccaacccuaacgcaaaccccaacgcgaaccccaacgcaaaccccaacgcaaaccccaacgccaaccccaacgccaacccaaacgccaauccaaacgcaaaucccccagucaccaacauggaaaacaucaccucaggcuuccucggcccccuucucguccuacaagcugguuucuuccuucuaacccgcauccucacgaucccccaaucccucgacucaugguggaccucacucaacuuucucggaggcucacccguaugccucggacaaaacucccaaucccccaccuccaaccauuccccaaccucaugcccaccaauaugccccggcuaccguuggaugugccuccgccguuucaucauauuccuuuucauacuccuccucugccucaucuuccugcucgugcuccuagacuaucaagguaugcuacccguaugcccacucauccccggcucaaccacgacaaacacuggccccugcaaaacaugcaccacacccgcacaaggaaacuccauguuccccucaugcugcugcaccaaaccaacagacggaaacuguaccugcaucccuauccccuccuccugggccuucgcaaaauaucuaugggagugggccagcguacgcuuuuccuggcuuucccuccugguccccuucguccaaugguucguaggccucuccccaaccguauggcuauccgcaaucuggaugaugugguacuggggcccaucucucuacucaauaguaucacccuucaucccacuccuccccaucuucuucugccucuggguauacaucuaaggacuaguuauaagacugacuagcccgaugggccucccaacgggcccuccuccccuccuugcaccgagauuaaucaaaggcucuuuucagagccaccaaaaaaaaaaaaaaaaaaaaaaaaaaaaaaaaaaaaaaaaaaaaaaaaaaaaaaaaaaaaaaaaaaaaaaaaaaaaaaaaaaaaaaaaaaaaaaaaaaaaa

SEQ ID NO: 10070 - RNA, 1839 nt, Artificial Sequence
  mRNA Design i-3 (hSL-A100) comprising derived and/or modified sequence from Pf(3D7)__XP_001351122.1__HsALB_Pf-CSP(19-272)_L(AAY)_Pf-CSP(346-3 65)_L(AAY)_PADRE_L(PVTN)_HBsAg (opt11)
aggagaaagcuuaccaugaaauggguaaccuucauaucccuucuauucuuauucucuuccgcauacucccucuuccaagaauaucagugcuacggcucauccucaaacacacgaguccucaacgaacucaacuacgacaacgccggcaccaaucucuacaacgaacucgaaaugaacuacuacggcaaacaagaaaacugguacucccuuaagaaaaacucacgcucucucggcgaaaacgacgacggcaacaacgaagacaacgaaaaauuacgcaaacccaaacacaagaaacucaaacaaccagccgacggcaacccagaccccaaugcaaacccuaacgucgaccccaacgccaacccuaacgucgacccaaacgccaacccgaacgucgaccccaacgcaaacccaaacgccaaccccaaugccaaucccaacgccaacccuaacgccaaccccaacgccaaccccaacgccaacccuaacgccaaccccaaugcaaacccaaacgccaacccaaacgcaaacccaaacgccaauccaaacgccaacccaaacgccaaccccaacgccaacccaaacgccaaucccaacgccaaccccaacguagaccccaaugcgaacccaaacgccaacccuaacgccaaccccaacgcaaacccaaacgcuaacccaaacgcaaaccccaacgcaaaccccaacgcaaacccgaacgcgaaccccaacgccaauccaaacgcaaacccuaacgcaaacccaaacgccaacccaaacgccaacccaaacgcaaacccaaacgccaauccaaacgcaaacccgaacgcaaaccccgccgcuuacaucaaacccggaucggccaacaaacccaaagacgaacuugauuacgccaacgacaucgaagcagccuacgcaaaauucguagcggccuggacccuaaaagcagcagcacccgucacaaacauggaaaacaucacaucuggcuucuuaggcccacuccuaguccuccaggccggcuucuuccuacuaacccguauacucaccauaccacaaucacucgacucaugguggaccucccuaaacuuccucggcggaucacccgucugccugggccaaaacucgcaaucccccaccucaaaucauucgcccacaucaugcccgcccaucugccccggcuaccgguggaugugccuccgcagauucauaaucuuccucuucauacuacuacuuugccuaaucuuccucuuaguccuacucgacuaccaaggcaugcuccccgucugcccccuuauacccggcuccaccaccaccaauaccggccccugcaaaaccugcacaacacccgcccaaggcaacucaauguucccguccugcuguugcaccaaaccaaccgacggaaauugcacaugcaucccaauccccucaucaugggcauucgccaaauaccucugggaaugggccuccguccguuucuccuggcucagccuacucguucccuucguccaaugguuugucggccuuucaccuacaguauggcuauccgccauauggaugaugugguacuggggacccucacucuacucaauugucucccccuucaucccauuacuccccaucuucuucugccucugggucuacauauaaggacuaguuauaagacugacuagcccgaugggccucccaacgggcccuccuccccuccuugcaccgagauuaaucaaaggcucuuuucagagccaccaaaaaaaaaaaaaaaaaaaaaaaaaaaaaaaaaaaaaaaaaaaaaaaaaaaaaaaaaaaaaaaaaaaaaaaaaaaaaaaaaaaaaaaaaaaaaaaaaaaaa

SEQ ID NO: 10071 - RNA, 2058 nt, Artificial Sequence
  mRNA Design i-3 (hSL-A100) comprising derived and/or modified sequence from Pf(3D7)__XP_001351122.1__HsALB_Pf-CSP(19-384)_L(PVTN)_HBsAg (opt11)
aggagaaagcuuaccaugaaaugggucaccuucauaucacuccuauuccuauuuucaagcgccuacucccucuuccaagaauaucaaugcuauggcucaagcucaaacacccgcguccucaacgagcuaaacuacgacaacgcaggaaccaaccucuacaacgaacuggaaaugaacuacuacggaaaacaagagaacugguacuccuuaaagaaaaacucccgcucccucggcgaaaacgaugacgguaacaacgaagacaaugaaaaacuccgaaaacccaaacacaagaaacuaaaacaaccagccgacggaaaccccgacccgaacgcaaaccccaacguagacccaaacgcaaacccuaauguagacccaaacgccaacccaaacgucgacccaaacgcaaacccaaacgcuaaccccaacgccaacccaaacgccaaccccaacgccaaccccaaugccaacccaaacgcgaaccccaacgcaaaccccaacgccaacccgaacgccaacccaaacgccaacccaaacgccaaccccaacgcgaacccaaacgccaacccaaacgcuaaccccaacgcaaaccccaacgccaacccuaacgucgacccaaacgccaaucccaacgccaaccccaacgcaaaccccaacgccaacccgaacgcgaaccccaacgcaaaccccaacgcaaacccaaacgccaaccccaacgccaacccaaacgccaacccgaacgccaacccaaacgcgaaucccaaugccaaccccaacgccaauccuaaugcaaacccaaacgcaaaccccaacgccaauccgaacgcaaacccgaacaaaaacaaccaagguaacggccaaggccacaacaugcccaacgaccccaaccgcaacgucgacgaaaacgcaaacgccaacuccgcaguuaaaaacaacaacaacgaagaaccaucagacaaacacauaaaagaauaccucaacaaaauccaaaacucgcucuccaccgaauggucccccuguagcguaaccugcgguaauggaauacaaguccgaaucaaaccaggcucugccaacaaacccaaagacgaacuagacuacgccaacgacauugaaaagaaaaucugcaaaauggaaaaauguagcuccgucuucaacguagucaacuccucccccguuaccaacauggagaacauaaccuccggcuuccucggcccccuucucgugcuacaggccggauucuuccuccuaaccaggauccuaaccaucccccagucacucgacuccugguggaccucacucaacuuccucggcggaucccccgucugccucggacaaaacucccaaucccccaccucaaaccacuccccaaccucuugcccgcccauaugccccgguuaccgcuggaugugccuucgccgcuucaucauauuucuauucauccuccuucucugccuaauauuccuacucguacuccucgacuaccaaggcaugcuacccgucugcccucuuauacccggauccacgacaaccaacaccggccccugcaaaaccugcaccacacccgcccaaggcaacucuauguuccccucaugcugcugcacaaaacccaccgacggcaacugcacaugcauaccaauccccucuuccugggccuuugccaaauaccuuugggaaugggcuuccguccguuuuuccugguuaucccuccuggucccauucguccaaugguucgucggccuuucaccaaccgucuggcuauccgccaucuggaugaugugguacuggggucccucccucuacagcaucgucucaccauuuaucccccuccugcccaucuucuucugcuuguggguauacauaugaggacuaguuauaagacugacuagcccgaugggccucccaacgggcccuccuccccuccuugcaccgagauuaaucaaaggcucuuuucagagccaccaaaaaaaaaaaaaaaaaaaaaaaaaaaaaaaaaaaaaaaaaaaaaaaaaaaaaaaaaaaaaaaaaaaaaaaaaaaaaaaaaaaaaaaaaaaaaaaaaaaaa

SEQ ID NO: 10072 - RNA, 1875 nt, Artificial Sequence
  mRNA Design i-3 (hSL-A100) comprising derived and/or modified sequence from Pf(3D7)__XP_001351122.1__HsALB_Pf-CSP(19-384)_L(SGG)_Ferritin (opt11)
aggagaaagcuuaccaugaaaugggucaccuucauaucacuacuuuuccuguucuccucagcauacucacucuuccaagaguaccaaugcuacggcucaucauccaauacccgcguacuuaacgaauuaaacuacgacaacgcaggcaccaaccucuacaacgaacucgaaaugaacuauuacggaaaacaagaaaacugguacucacuaaagaaaaacagcagaucccucggcgaaaacgacgacggcaauaacgaagacaacgaaaaacugagaaaaccuaaacacaagaaacucaaacaacccgcagacggcaaccccgaccccaacgccaacccaaacguagaccccaacgccaaccccaacgucgaccccaacgccaacccuaaugucgacccaaacgcaaacccuaacgcaaaccccaaugccaacccaaacgccaaccccaacgcaaaccccaacgcaaauccaaacgcaaaucccaacgcaaaccccaaugccaaccccaacgcaaacccaaacgccaaccccaacgcaaaccccaacgcuaacccaaacgccaacccaaacgcaaacccaaacgccaaccccaacgcuaaccccaacgucgaccccaacgccaaccccaacgcaaacccaaacgccaaccccaaugcaaacccaaacgccaaccccaacgcaaacccaaacgccaacccaaacgccaaccccaacgcaaaccccaacgcuaaccccaacgcaaaccccaaugcaaacccgaacgccaacccaaacgcaaacccaaacgccaacccaaacgccaaccccaacgccaacccaaacgccaacccaaacaaaaacaaccaagguaacggacaaggccacaacaugcccaacgauccuaaccgcaacguagacgaaaacgccaacgcaaacagcgcagucaaaaacaacaacaacgaggaaccaucagacaaacacaucaaagaauaccucaacaaaauccaaaacucccuauccacagaauggucacccugcuccguaaccugcggcaacggcauccaaguacgcaucaaacccggauccgcaaacaaaccaaaagaugaauuagauuaugcaaacgacauagaaaagaaaauaugcaaaauggaaaaaugcuccuccguauucaacguagucaacuccucuucagggggacucuccaaagacaucaucaaacuucucaacgaacaagucaacaaagagaugaacagcuccaaccucuacaugucaaugucaagcuggugcuacacacacucacuggacggcgccggccucuuccuauucgaccacgccgcagaagaauacgaacacgccaagaaacuuauaaucuuccuaaacgaaaauaacguaccuguccaacucacaucaaucucggccccagaacauaaauucgaagggcucacgcaaauauuucaaaaagcauacgaacacgaacagcacaucuccgaaucaaucaacaacauugucgaccacgcaaucaaauccaaagaccacgccacauucaacuuccuacaaugguacguggccgaacaacacgaagaagaaguccucuucaaagacauacuagacaaaaucgaacuaaucggcaacgaaaaccacggccucuaccuagccgaccaauacguaaaaggaaucgcgaaaucccgcaaauccuaaggacuaguuauaagacugacuagcccgaugggccucccaacgggcccuccuccccuccuugcaccgagauuaaucaaaggcucuuuucagagccaccaaaaaaaaaaaaaaaaaaaaaaaaaaaaaaaaaaaaaaaaaaaaaaaaaaaaaaaaaaaaaaaaaaaaaaaaaaaaaaaaaaaaaaaaaaaaaaaaaaaaa

SEQ ID NO: 10073 - RNA, 1836 nt, Artificial Sequence
  mRNA Design i-3 (hSL-A100) comprising derived and/or modified sequence from Pf(3D7)__XP_001351122.1__HsALB_Pf-CSP(93-384)_L(PVTN)_HBsAg (opt11)
aggagaaagcuuaccaugaaaugggucaccuuuaucucacuccuauuucucuucucuuccgcauacuccaaacucaaacaacccgcagacggaaaccccgacccaaacgcaaaccccaacguagaccccaacgccaaccccaacgucgaccccaacgccaaccccaacguagaccccaacgcaaaccccaacgccaacccaaacgccaaccccaacgccaaccccaacgccaaucccaacgccaacccaaacgcaaaucccaacgcaaaccccaacgccaaccccaacgccaacccaaacgccaauccaaacgcaaacccuaacgccaacccuaacgcgaaccccaacgccaaccccaacgcaaaccccaacgccaaccccaaugucgaccccaacgccaaccccaacgccaaccccaacgcaaaccccaacgcaaacccaaacgccaaucccaacgccaaccccaacgcaaacccuaacgccaaccccaaugccaauccuaacgccaaccccaacgccaacccuaacgccaacccaaacgccaaccccaacgccaaccccaacgccaacccuaacgccaacccuaacgccaacccaaacgccaauccaaacaagaacaaccaaggcaacggucaaggccacaauaugccaaacgacccaaaccgaaacguagacgaaaacgccaacgccaacuccgccgucaaaaacaacaacaacgaagaacccuccgacaaacacaucaaagaauaucugaacaaaauccaaaacucccucuccaccgaauggucccccugcuccgucacuuguggcaauggcauacaaguccgcaucaaacccggcucagccaacaaacccaaagacgaacucgacuacgcaaacgacaucgaaaagaaaauaugcaaaauggaaaaaugcuccucugucuucaacgucgucaacuccucgcccguaaccaacauggaaaacaucaccucaggauuccucggcccccuacucguccuccaagccggcuucuuccuccucacccgaauccuuacaaucccccaaucccuugacucaugguggaccucccuuaauuuccucggcgguucccccgucugccuuggccaaaacucacaaucccccaccucaaaccacucccccacuuccugcccgcccauaugccccggcuaccgcuggaugugccuccgccgguucaucauauuccucuucauccuacuccucugccuuauauuucuauuaguccuccuagacuaccaaggaaugcuccccguaugcccacuaauccccggauccaccaccaccaacaccggccccugcaaaaccugcaccaccccugcacaaggaaacuccauguucccaucuuguugcugcacaaaaccaaccgacggcaacuguaccugcauccccaucccuucaucaugggccuucgccaaauaccuaugggaaugggccucaguacguuucuccuggcuaucccuccucgucccauucguucaaugguucgucggccuaucccccacgguauggcucuccgcaauauggaugaugugguacuggggccccucacuauacaguauaguuucccccuucauaccccuccuccccauauucuucugccucuggguauacaucuagggacuaguuauaagacugacuagcccgaugggccucccaacgggcccuccuccccuccuugcaccgagauuaaucaaaggcucuuuucagagccaccaaaaaaaaaaaaaaaaaaaaaaaaaaaaaaaaaaaaaaaaaaaaaaaaaaaaaaaaaaaaaaaaaaaaaaaaaaaaaaaaaaaaaaaaaaaaaaaaaaaaa

SEQ ID NO: 10074 - RNA, 1497 nt, Artificial Sequence
  mRNA Design i-3 (hSL-A100) comprising derived and/or modified sequence from Pf(3D7)__XP_001351122.1__HsALB_Pf-CSP(199-377)_L(PVTN)_HBsAg (opt11)
aggagaaagcuuaccaugaaauggguaaccuucaucucccuccuauucuuauucucaucagccuacuccgacccaaacgcaaaccccaaugccaaccccaacgccaaccccaacgccaaucccaacgccaaccccaacgccaaucccaaugcuaaccccaacgccaacccaaacgccaacccaaacgcaaaccccaacgccaaccccaacgccaaccccaacgccaacccaaacgccaaccccaacgcaaaccccaacgccaacccaaacgccaaccccaacgccaacccaaacaaaaacaaucaaggcaacggccaaggacacaacaugcccaacgaccccaaccgcaacgucgacgaaaacgcaaacgccaacucugcagucaaaaacaacaacaacgaagaacccuccgacaaacacauaaaagaauaccucaacaaaauccaaaacucccucuccacagaaugguccccaugcuccgucacgugcggcaacggcauccaaguacgcaucaaacccggcucugccaacaaaccuaaagacgaacucgacuacgccaacgacaucgaaaagaaaaucugcaaaauggaaaaaugcuccucaguccccguaacuaacauggaaaacaucacguccggcuuccucggcccccuccuaguccuccaagccggcuucuuccuacucacacgcauucuuaccaucccgcaaucacucgacuccugguggaccucccucaacuucuuaggcggcuccccugucugccucggccaaaacucacaaucccccacuucaaaccacucacccaccagcugcccacccauaugcccaggauaccgcuggaugugccuccgccguuucauaaucuuccucuucauacuccuacucugccuaaucuuccuccucguacuccuagacuaccaaggcaugcuccccgucugcccacucauccccggaagcacuacaaccaacaccggccccugcaaaacaugcaccacccccgcacaaggcaacuccauguuccccuccugcugcugcacaaaacccacugauggcaacugcacuugcauccccauccccuccucaugggccuucgccaaauaucucugggaaugggccagcguccgguucucuuggcucucacuccuaguccccuucguucaaugguucguaggccuaucccccaccgucuggcucuccgcaauauggaugaugugguauuggggccccucccucuacuccauuguaucccccuucaucccacuacuccccaucuucuucugccuuugggucuacauauaaggacuaguuauaagacugacuagcccgaugggccucccaacgggcccuccuccccuccuugcaccgagauuaaucaaaggcucuuuucagagccaccaaaaaaaaaaaaaaaaaaaaaaaaaaaaaaaaaaaaaaaaaaaaaaaaaaaaaaaaaaaaaaaaaaaaaaaaaaaaaaaaaaaaaaaaaaaaaaaaaaaaa

SEQ ID NO: 10075 - RNA, 1194 nt, Artificial Sequence
  mRNA Design i-3 (hSL-A100) comprising derived and/or modified sequence from Pf(3D7)__XP_001351122.1__HsALB_Pf-CSP(19-272)_L(AAY)_Pf-CSP(346-3 75)_L(AAY)_Pf-CSP(310-327) (opt11)
aggagaaagcuuaccaugaaauggguaaccuucaucucacuccuauuccuguucuccagugcauacucacucuuccaagaauaccaaugcuacggcuccagcagcaacacgcgaguccucaacgaacuaaacuacgauaacgccggaaccaaccuuuacaacgaacucgaaaugaacuacuacggcaaacaagaaaacugguacucacuaaaaaaaaacagcagaucacuaggcgaaaacgacgacggaaacaacgaagacaacgaaaaacuacgcaagcccaaacacaagaaacucaaacaacccgcagacggaaacccagaccccaacgcaaaccccaacguagaccccaacgcaaaccccaacguagaccccaacgcaaaucccaacguagacccaaacgcaaaccccaacgcaaacccaaacgcaaacccaaacgcgaacccaaacgcaaacccaaacgcaaacccgaacgccaacccaaacgcaaacccaaacgcuaaccccaacgcaaacccaaacgcaaacccaaacgcaaacccaaacgcaaacccaaacgcaaacccaaacgcaaacccgaacgcaaacccaaacgcaaaccccaacguagacccaaacgccaacccaaacgcaaaccccaacgccaacccaaacgcaaacccaaacgcaaacccaaacgcaaacccaaacgcaaacccaaacgcaaacccaaacgcaaaccccaacgcgaacccaaacgccaacccaaacgcaaacccaaacgcgaacccaaacgccaaccccaacgcaaaccccaacgcaaaccccaacgcaaacccaaacgcaaaccccgccgcuuacauaaaacccggcucggccaauaaaccaaaagacgaacucgacuacgccaacgacauagaaaaaaaaauaugcaaaauggaaaaaugcagcgccgccuacgaaccaucagacaaacacaucaaagaauaccucaacaaaauacaaaacagccucuaaggacuaguuauaagacugacuagcccgaugggccucccaacgggcccuccuccccuccuugcaccgagauuaaucaaaggcucuuuucagagccaccaaaaaaaaaaaaaaaaaaaaaaaaaaaaaaaaaaaaaaaaaaaaaaaaaaaaaaaaaaaaaaaaaaaaaaaaaaaaaaaaaaaaaaaaaaaaaaaaaaaaa

SEQ ID NO: 10076 - RNA, 1242 nt, Artificial Sequence
  mRNA Design i-3 (hSL-A100) comprising derived and/or modified sequence from Pf(3D7)__XP_001351122.1__HsALB_Pf-CSP(19-272)_L(AAY)_Pf-CSP(346-3 75)_L(AAY)_Pf-CSP(310-327)_L(AAY)_PADRE (opt11)
aggagaaagcuuaccaugaaauggguaacauuuaucucccuccucuuccucuuuuccuccgcauacucacucuuccaagaauaccaaugcuacggaucaagcuccaacacccgcguccuuaacgaacuuaacuacgacaacgccggcaccaacuuauacaacgaacucgagaugaacuacuacggcaaacaagaaaacugguacucccucaaaaaaaacuccagaucccucggcgaaaacgacgacggaaacaacgaagacaacgaaaaacuccgcaaacccaaacacaaaaaacucaaacaacccgcugacggcaacccugaccccaacgccaaccccaacguagaccccaacgccaaucccaacguagacccaaacgccaaccccaacguagaccccaacgccaaccccaacgcaaacccaaacgccaaccccaacgccaaccccaacgcgaacccaaacgccaaccccaacgccaacccuaacgccaacccgaacgccaaccccaacgccaaccccaacgccaaccccaacgcgaaccccaacgcaaaccccaacgccaaccccaacgcaaaccccaacgccaaccccaacgccaaccccaacguagaccccaacgccaacccaaacgccaacccaaacgcaaaccccaacgccaauccaaacgcaaaccccaacgcaaaccccaaugccaacccaaacgccaaccccaacgccaacccaaacgccaacccaaacgccaaccccaacgcaaacccaaacgcaaaccccaacgcaaacccuaacgccaacccaaacgccaacccaaacgcaaaccccaacgcaaaccccgccgccuacaucaaaccaggcuccgccaauaaaccaaaagacgaacucgacuacgcaaaugacauagaaaaaaaaauaugcaaaauggaaaaaugcuccgcagccuacgaacccagcgacaaacauaucaaagaauacuuaaacaaaauccaaaacucccuagccgccuacgccaaauucgucgcagccuggacccucaaagccgccgccuaaggacuaguuauaagacugacuagcccgaugggccucccaacgggcccuccuccccuccuugcaccgagauuaaucaaaggcucuuuucagagccaccaaaaaaaaaaaaaaaaaaaaaaaaaaaaaaaaaaaaaaaaaaaaaaaaaaaaaaaaaaaaaaaaaaaaaaaaaaaaaaaaaaaaaaaaaaaaaaaaaaaaa

SEQ ID NO: 10077 - RNA, 1242 nt, Artificial Sequence
  mRNA Design i-3 (hSL-A100) comprising derived and/or modified sequence from Pf(3D7)__XP_001351122.1__HsALB_Pf-CSP(19-272)_L(AAY)_Pf-CSP(310-3 27)_L(AAY)_Pf-CSP(346-375)_L(AAY)_PADRE (opt11)
aggagaaagcuuaccaugaaaugggugaccuuuaucucacuccucuuccucuucucaagcgcauacucacucuuccaagaauaccaaugcuacgguucaagcucaaacacaagaguccucaacgaacucaacuacgacaacgccggaaccaaccucuacaacgaacucgaaaugaacuacuacggcaaacaagaaaacugguacucacucaaaaaaaacagcaggucccuaggcgaaaacgacgacggaaacaacgaagacaacgaaaaacuccgcaaaccaaaacacaaaaaacugaaacaacccgcagacggaaacccagaccccaacgcaaacccgaacgucgacccgaacgccaacccaaacguagacccaaacgcaaaccccaacgucgacccaaacgcaaacccaaacgcaaacccaaacgcaaacccgaacgcaaacccaaacgcgaacccaaacgcaaacccaaacgcaaacccaaacgccaacccaaacgcaaacccaaaugcaaaccccaacgcaaacccgaacgcaaacccaaacgcaaaccccaacgcaaacccaaacgcuaacccaaacgcgaaccccaacgcaaacccaaacguggacccaaacgcaaacccaaacgcaaacccaaacgcgaacccgaacgcaaacccaaacgcgaacccaaacgcaaaccccaacgcaaacccaaacgcaaacccaaacgccaacccaaacgcaaacccaaacgcgaaccccaacgccaacccaaacgcaaacccaaacgcaaacccaaacgcaaacccaaacgcaaacccaaacgccaacccaaacgcaaacccagcugccuacgaacccuccgacaaacacaucaaagaguaccugaacaaaauccaaaacucccucgcagccuacaucaagcccggauccgcaaacaaacccaaagacgaacucgacuacgccaacgacauagaaaaaaaaaucugcaaaauggaaaaaugcucagccgcauacgcaaaauucguagcagccuggacccuaaaagcggcagcauaaggacuaguuauaagacugacuagcccgaugggccucccaacgggcccuccuccccuccuugcaccgagauuaaucaaaggcucuuuucagagccaccaaaaaaaaaaaaaaaaaaaaaaaaaaaaaaaaaaaaaaaaaaaaaaaaaaaaaaaaaaaaaaaaaaaaaaaaaaaaaaaaaaaaaaaaaaaaaaaaaaaaa

SEQ ID NO: 10078 - RNA, 1296 nt, Artificial Sequence
  mRNA Design i-3 (hSL-A100) comprising derived and/or modified sequence from Pf(3D7)__XP_001351122.1__HsALB_Pf-CSP(19-272)_L(AAY)_Pf-CSP(310-3 27)_L(AAY)_Pf-CSP(346-375)_L(AAY)_PADRE_L(AAY)_P2 (opt11)
aggagaaagcuuaccaugaaaugggugaccuucauaucacuauuauuccucuucucaagcgcauacucacucuuccaagaauaccaaugcuacggcuccuccucaaacacgcgcguacucaacgaacuaaacuacgacaacgccggaacaaaccucuacaacgaacuagaaaugaacuacuacggcaaacaagaaaacugguacucccuaaaaaaaaacucaagaucccuaggcgagaaugacgacggcaacaacgaagacaacgaaaaacuccgcaaacccaaacacaaaaaacucaaacaacccgccgacggaaacccagacccaaacgccaacccaaacgucgacccaaacgcaaaccccaacguagaccccaacgcaaacccaaacguagacccaaacgcaaacccaaacgcaaacccaaacgcaaaccccaacgccaacccaaacgcaaacccaaacgccaauccaaacgcaaacccaaaugccaacccaaacgcaaacccaaacgcaaacccaaacgccaaccccaacgcaaacccaaacgcaaacccaaacgccaacccaaacgcaaacccaaacgcaaaccccaacgccaacccgaacguagaccccaacgcaaaccccaacgcaaacccaaacgccaauccaaacgcaaaccccaacgcaaaccccaacgcaaaccccaacgccaauccaaacgccaaccccaacgcgaacccgaacgcaaacccaaacgcaaacccaaacgcaaacccaaacgcaaacccaaacgcaaacccaaacgcaaacccgaacgcaaaccccaacgccaacccaaacgcaaacccagccgcauacgaacccucagacaaacacauaaaagaauaccuaaacaaaauccaaaacucacucgcugccuacaucaaaccaggaagcgcaaacaaacccaaagacgaacucgauuacgccaacgacaucgaaaaaaaaaucugcaaaauggaaaaaugcuccgccgccuacgcaaaauucgucgcagccuggacucuaaaagccgccgcagccgcauaccaauacauaaaagccaacucaaaauucaucggaaucaccgaacuguaaggacuaguuauaagacugacuagcccgaugggccucccaacgggcccuccuccccuccuugcaccgagauuaaucaaaggcucuuuucagagccaccaaaaaaaaaaaaaaaaaaaaaaaaaaaaaaaaaaaaaaaaaaaaaaaaaaaaaaaaaaaaaaaaaaaaaaaaaaaaaaaaaaaaaaaaaaaaaaaaaaaaa

SEQ ID NO: 10079 - RNA, 1260 nt, Artificial Sequence
  mRNA Design i-3 (hSL-A100) comprising derived and/or modified sequence from Pf(3D7)__XP_001351122.1__HsALB_Pf-CSP(19-272)_L(AAY)_Pf-CSP(310-3 27)_Linker (AAY)_Pf-CSP(346-397) (opt11)
aggagaaagcuuaccaugaaaugggucaccuucaucucacuccuguuccuauucucgagcgcauacucccucuuccaagaauaccagugcuacggcucaagcucaaacacacgcguacucaacgaacuaaacuacgacaacgccggaaccaaccucuacaacgaacuagaaaugaacuacuacggcaaacaagagaacugguacucucuaaagaaaaacagcagaucccugggcgagaacgacgacggaaacaacgaagacaacgagaaacuacgcaaacccaaacacaagaaacuaaaacaacccgcagauggaaacccagauccaaacgcaaacccaaacgucgacccuaacgcaaaccccaacguagaccccaacgcaaaccccaacguagacccaaacgccaacccaaacgccaacccaaacgccaacccgaacgcaaaccccaaugccaacccaaacgccaacccgaacgccaacccaaacgcgaaccccaacgccaacccaaacgcaaacccaaacgcaaacccuaacgcaaaccccaacgccaacccaaaugccaacccaaacgcaaacccaaacgcaaacccaaacgccaaccccaacguagacccaaacgcaaaccccaacgcaaacccaaacgcaaacccaaacgccaacccaaacgcaaacccaaacgcaaacccaaacgcaaacccgaacgccaaccccaacgcaaacccaaacgcaaacccaaacgccaacccaaacgccaacccaaacgcaaaccccaacgcaaaccccaacgccaaccccaacgccaacccaaacgcaaacccaaacgcaaacccagccgcauacgaacccucagacaaacacauaaaagaauaccucaauaaaauccaaaacucacuugcagccuacauaaaaccaggcagcgcgaacaaacccaaagacgaacucgacuacgcgaacgacauagaaaagaaaaucugcaaaauggaaaaaugcucauccgucuucaaugucguaaacucauccauaggccuaaucaugguccucuccuuccuauuccucaacuaaggacuaguuauaagacugacuagcccgaugggccucccaacgggcccuccuccccuccuugcaccgagauuaaucaaaggcucuuuucagagccaccaaaaaaaaaaaaaaaaaaaaaaaaaaaaaaaaaaaaaaaaaaaaaaaaaaaaaaaaaaaaaaaaaaaaaaaaaaaaaaaaaaaaaaaaaaaaaaaaaaaaa

SEQ ID NO: 10080 - protein, 292 aa, Artificial Sequence
  derived and/or modified protein sequence (wt) from Pf(3D7)__XP_001351122.1__CSP(93-384)
KLKQPADGNPDPNANPNVDPNANPNVDPNANPNVDPNANPNANPNANPNANPNANPNANPNANPNANPNANPNANPNANPNANPNANPNANPNANPNANPNANPNVDPNANPNANPNANPNANPNANPNANPNANPNANPNANPNANPNANPNANPNANPNANPNANPNANPNANPNANPNKNNQGNGQGHNMPNDPNRNVDENANANSAVKNNNNEEPSDKHIKEYLNKIQNSLSTEWSPCSVTCGNGIQVRIKPGSANKPKDELDYANDIEKKICKMEKCSSVFNVVNSS

SEQ ID NO: 10081 - protein, 134 aa, Artificial Sequence
  derived and/or modified protein sequence (wt) from Pf(3D7)__XP_001351122.1__CSP(19-152)
LFQEYQCYGSSSNTRVLNELNYDNAGTNLYNELEMNYYGKQENWYSLKKNSRSLGENDDGNNEDNEKLRKPKHKKLKQPADGNPDPNANPNVDPNANPNVDPNANPNVDPNANPNANPNANPNANPNANPNANP

SEQ ID NO: 10082 - protein, 174 aa, Artificial Sequence
  derived and/or modified protein sequence (wt) from Pf(3D7)__XP_001351122.1__CSP(19-192)
LFQEYQCYGSSSNTRVLNELNYDNAGTNLYNELEMNYYGKQENWYSLKKNSRSLGENDDGNNEDNEKLRKPKHKKLKQPADGNPDPNANPNVDPNANPNVDPNANPNVDPNANPNANPNANPNANPNANPNANPNANPNANPNANPNANPNANPNANPNANPNANPNANPNANP

SEQ ID NO: 10083 - protein, 20 aa, Artificial Sequence
  derived and/or modified protein sequence (wt) from Pf(3D7)__XP_001351122.1__CSP(346-365)__Th3R
IKPGSANKPKDELDYANDIE

SEQ ID NO: 10084 - protein, 30 aa, Artificial Sequence
  derived and/or modified protein sequence (wt) from Pf(3D7)__XP_001351122.1__CSP(346-375)__Th3R_CS.T3
IKPGSANKPKDELDYANDIEKKICKMEKCS

SEQ ID NO: 10085 - protein, 52 aa, Artificial Sequence
  derived and/or modified protein sequence (wt) from Pf(3D7)__XP_001351122.1__CSP(346-397)
IKPGSANKPKDELDYANDIEKKICKMEKCSSVFNVVNSSIGLIMVLSFLFLN

SEQ ID NO: 10086 - RNA, 876 nt, Artificial Sequence
  derived and/or modified CDS sequence (wt) from Pf(3D7)__XP_001351122.1__CSP(93-384)
aaauuaaagcaaccagcggaugguaauccugauccaaaugcaaacccaaauguagaucccaaugccaacccaaauguagauccaaaugcaaacccaaauguagauccaaaugcaaacccaaaugcaaacccaaaugcaaacccaaaugcaaacccaaaugcaaacccaaaugcaaacccaaaugcaaacccaaaugcaaacccaaaugcaaacccaaaugcaaacccaaaugcaaacccaaaugcaaacccaaaugcaaacccaaaugcaaaccccaaugcaaauccuaaugcaaacccaaaugcaaacccaaacguagauccuaaugcaaauccaaaugcaaacccaaacgcaaaccccaaugcaaauccuaaugcaaaccccaaugcaaauccuaaugcaaauccuaaugccaauccaaaugcaaauccaaaugcaaacccaaacgcaaaccccaaugcaaauccuaaugccaauccaaaugcaaauccaaaugcaaacccaaaugcaaacccaaaugcaaaccccaaugcaaauccuaauaaaaacaaucaagguaauggacaaggucacaauaugccaaaugacccaaaccgaaauguagaugaaaaugcuaaugccaacagugcuguaaaaaauaauaauaacgaagaaccaagugauaagcacauaaaagaauauuuaaacaaaauacaaaauucucuuucaacugaaugguccccauguaguguaacuuguggaaaugguauucaaguuagaauaaagccuggcucugcuaauaaaccuaaagacgaauuagauuaugcaaaugauauugaaaaaaaaauuuguaaaauggaaaaauguuccaguguguuuaaugucguaaauaguuca

SEQ ID NO: 10087 - RNA, 402 nt, Artificial Sequence
  derived and/or modified CDS sequence (wt) from Pf(3D7)__XP_001351122.1__CSP(19-152)
uuauuccaggaauaccagugcuauggaaguucgucaaacacaaggguucuaaaugaauuaaauuaugauaaugcaggcacuaauuuauauaaugaauuagaaaugaauuauuaugggaaacaggaaaauugguauagucuuaaaaaaaauaguagaucacuuggagaaaaugaugauggaaauaacgaagacaacgagaaauuaaggaaaccaaaacauaaaaaauuaaagcaaccagcggaugguaauccugauccaaaugcaaacccaaauguagaucccaaugccaacccaaauguagauccaaaugcaaacccaaauguagauccaaaugcaaacccaaaugcaaacccaaaugcaaacccaaaugcaaacccaaaugcaaacccaaaugcaaaccca

SEQ ID NO: 10088 - RNA, 522 nt, Artificial Sequence
  derived and/or modified CDS sequence (wt) from Pf(3D7)__XP_001351122.1__CSP(19-192)
uuauuccaggaauaccagugcuauggaaguucgucaaacacaaggguucuaaaugaauuaaauuaugauaaugcaggcacuaauuuauauaaugaauuagaaaugaauuauuaugggaaacaggaaaauugguauagucuuaaaaaaaauaguagaucacuuggagaaaaugaugauggaaauaacgaagacaacgagaaauuaaggaaaccaaaacauaaaaaauuaaagcaaccagcggaugguaauccugauccaaaugcaaacccaaauguagaucccaaugccaacccaaauguagauccaaaugcaaacccaaauguagauccaaaugcaaacccaaaugcaaacccaaaugcaaacccaaaugcaaacccaaaugcaaacccaaaugcaaacccaaaugcaaacccaaaugcaaacccaaaugcaaacccaaaugcaaacccaaaugcaaacccaaaugcaaacccaaaugcaaacccaaaugcaaaccccaaugcaaauccuaaugcaaaccca

SEQ ID NO: 10089 - RNA, 60 nt, Artificial Sequence
  derived and/or modified CDS sequence (wt) from Pf(3D7)__XP_001351122.1__CSP(346-365)__Th3R
auaaagccuggcucugcuaauaaaccuaaagacgaauuagauuaugcaaaugauauugaa

SEQ ID NO: 10090 - RNA, 90 nt, Artificial Sequence
  derived and/or modified CDS sequence (wt) from Pf(3D7)__XP_001351122.1__CSP(346-375)__Th3R_CS.T3
auaaagccuggcucugcuaauaaaccuaaagacgaauuagauuaugcaaaugauauugaaaaaaaaauuuguaaaauggaaaaauguucc

SEQ ID NO: 10091 - RNA, 156 nt, Artificial Sequence
  derived and/or modified CDS sequence (wt) from Pf(3D7)__XP_001351122.1__CSP(346-397)
auaaagccuggcucugcuaauaaaccuaaagacgaauuagauuaugcaaaugauauugaaaaaaaaauuuguaaaauggaaaaauguuccaguguguuuaaugucguaaauaguucaauaggauuaauaaugguauuauccuucuuguuccuuaau

SEQ ID NO: 10092 - RNA, 876 nt, Artificial Sequence
  derived and/or modified CDS sequence (opt1) from Pf(3D7)__XP_001351122.1__CSP(93-384)
aagcugaagcagccggccgacgggaaccccgaccccaacgccaaccccaacguggacccgaacgccaaccccaacgucgaccccaacgccaaccccaacguggacccgaacgcgaaccccaacgccaaccccaacgccaaccccaacgccaacccgaacgcgaaccccaacgccaaccccaacgccaaccccaacgccaacccgaacgccaaccccaacgcgaaccccaacgccaaccccaacgccaacccgaacgccaaccccaacgccaaccccaacgcgaaccccaacgccaacccgaacgccaaccccaacguggaccccaacgccaaccccaacgccaacccgaacgcgaaccccaacgccaaccccaacgccaacccgaacgccaaccccaacgccaaccccaacgcgaaccccaacgccaacccgaacgccaaccccaacgccaaccccaacgcgaaccccaacgccaacccgaacgccaaccccaacgccaaccccaacgccaaccccaacgcgaacccgaacgccaaccccaacaagaacaaccagggcaacggccaggggcacaacaugcccaacgaccccaaccgcaacgucgacgagaacgccaacgccaacuccgccgugaagaacaacaacaacgaggagccgagcgacaagcacaucaaggaguaccugaacaagauccagaacucccucagcacggaguggucccccugcagcgugaccugcggcaacgggauccagguccggaucaagcccggcuccgcgaacaagcccaaggacgagcuggacuacgccaacgacaucgagaagaagaucugcaagauggagaagugcagcuccguguucaacguggucaacagcucc

SEQ ID NO: 10093 - RNA, 402 nt, Artificial Sequence
  derived and/or modified CDS sequence (opt1) from Pf(3D7)__XP_001351122.1__CSP(19-152)
cuguuccaggaguaccagugcuacggcuccagcuccaacacccgggugcucaacgagcugaacuacgacaacgcggggaccaaccuguacaacgagcucgagaugaacuacuacggcaagcaggagaacugguacagccugaagaagaacucccgcagccugggggagaacgacgacggcaacaacgaggacaacgagaagcuccggaagcccaagcacaagaagcugaagcagccggccgacgggaaccccgaccccaacgccaaccccaacguggacccgaacgccaaccccaacgucgaccccaacgccaaccccaacguggacccgaacgcgaaccccaacgccaaccccaacgccaaccccaacgccaacccgaacgcgaaccccaacgccaacccc

SEQ ID NO: 10094 - RNA, 522 nt, Artificial Sequence
  derived and/or modified CDS sequence (opt1) from Pf(3D7)__XP_001351122.1__CSP(19-192)
cuguuccaggaguaccagugcuacggcuccagcuccaacacccgggugcucaacgagcugaacuacgacaacgcggggaccaaccuguacaacgagcucgagaugaacuacuacggcaagcaggagaacugguacagccugaagaagaacucccgcagccugggggagaacgacgacggcaacaacgaggacaacgagaagcuccggaagcccaagcacaagaagcugaagcagccggccgacgggaaccccgaccccaacgccaaccccaacguggacccgaacgccaaccccaacgucgaccccaacgccaaccccaacguggacccgaacgcgaaccccaacgccaaccccaacgccaaccccaacgccaacccgaacgcgaaccccaacgccaaccccaacgccaaccccaacgccaacccgaacgccaaccccaacgcgaaccccaacgccaaccccaacgccaacccgaacgccaaccccaacgccaaccccaacgcgaaccccaacgccaacccg

SEQ ID NO: 10095 - RNA, 60 nt, Artificial Sequence
  derived and/or modified CDS sequence (opt1) from Pf(3D7)__XP_001351122.1__CSP(346-365)__Th3R
aucaagcccggcuccgcgaacaagcccaaggacgagcuggacuacgccaacgacaucgag

SEQ ID NO: 10096 - RNA, 90 nt, Artificial Sequence
  derived and/or modified CDS sequence (opt1) from Pf(3D7)__XP_001351122.1__CSP(346-375)__Th3R_CS.T3
aucaagcccggcuccgcgaacaagcccaaggacgagcuggacuacgccaacgacaucgagaagaagaucugcaagauggagaagugcagc

SEQ ID NO: 10097 - RNA, 156 nt, Artificial Sequence
  derived and/or modified CDS sequence (opt1) from Pf(3D7)__XP_001351122.1__CSP(346-397)
aucaagcccggcuccgcgaacaagcccaaggacgagcuggacuacgccaacgacaucgagaagaagaucugcaagauggagaagugcagcuccguguucaacguggucaacagcuccaucgggcugaucauggugcucagcuuccuguuccugaac

SEQ ID NO: 10098 - RNA, 876 nt, Artificial Sequence
  derived and/or modified CDS sequence (opt1) from Pf(3D7)__XP_001351122.1__CSP(93-384)
aagcugaagcagcccgccgacggcaacccggaccccaacgccaaccccaacguggaccccaacgcgaacccgaacgucgaccccaacgccaaccccaacguggaccccaacgccaacccgaacgccaaccccaacgccaaccccaacgcgaaccccaacgccaacccgaacgccaaccccaacgccaaccccaacgcgaaccccaacgccaacccgaacgccaaccccaacgccaaccccaacgccaaccccaacgcgaacccgaacgccaaccccaacgccaaccccaacgccaaccccaacgccaacccgaacguggaccccaacgcgaaccccaacgccaaccccaacgccaacccgaacgccaaccccaacgccaaccccaacgcgaacccgaacgccaaccccaacgccaaccccaacgccaaccccaacgccaacccgaacgcgaaccccaacgccaaccccaacgccaaccccaacgccaacccgaacgcgaaccccaacgccaaccccaacgccaaccccaacgccaacccgaacaagaacaaccaggggaacggccaggggcacaacaugcccaacgaccccaaccgcaacgucgacgagaacgccaacgcgaacagcgccgugaagaacaacaacaacgaggagcccuccgacaagcacaucaaggaguaccucaacaagauccagaacagccuguccaccgaguggagcccgugcuccgugaccugcggcaacgggauccagguccggaucaagcccggcagcgccaacaagcccaaggacgagcuggacuacgccaacgacaucgagaagaagaucugcaagauggagaagugcuccagcguguucaacguggucaacuccagc

SEQ ID NO: 10099 - RNA, 402 nt, Artificial Sequence
  derived and/or modified CDS sequence (opt1) from Pf(3D7)__XP_001351122.1__CSP(19-152)
cuguuccaggaguaccagugcuacggcagcuccagcaacacccgcgugcucaacgagcugaacuacgacaacgccgggaccaaccuguacaacgagcucgagaugaacuacuacggcaagcaggagaacugguacucccugaagaagaacagccggucccugggggagaacgacgacggcaacaacgaggacaacgagaagcuccgcaagcccaagcacaagaagcugaagcagccggccgacgggaaccccgaccccaacgcgaaccccaacgucgacccgaacgccaaccccaacguggaccccaacgccaaccccaacguggacccgaacgccaaccccaacgccaaccccaacgcgaaccccaacgccaacccgaacgccaaccccaacgccaacccc

SEQ ID NO: 10100 - RNA, 522 nt, Artificial Sequence
  derived and/or modified CDS sequence (opt1) from Pf(3D7)__XP_001351122.1__CSP(19-192)
cuguuccaggaguaccagugcuacggcagcuccagcaacacccgcgugcucaacgagcugaacuacgacaacgccgggaccaaccuguacaacgagcucgagaugaacuacuacggcaagcaggagaacugguacucccugaagaagaacagccggucccugggggagaacgacgacggcaacaacgaggacaacgagaagcuccgcaagcccaagcacaagaagcugaagcagccggccgacgggaaccccgaccccaacgcgaaccccaacgucgacccgaacgccaaccccaacguggaccccaacgccaaccccaacguggacccgaacgccaaccccaacgccaaccccaacgcgaaccccaacgccaacccgaacgccaaccccaacgccaaccccaacgcgaaccccaacgccaacccgaacgccaaccccaacgccaaccccaacgccaaccccaacgcgaacccgaacgccaaccccaacgccaaccccaacgccaaccccaacgccaacccg

SEQ ID NO: 10101 - RNA, 60 nt, Artificial Sequence
  derived and/or modified CDS sequence (opt1) from Pf(3D7)__XP_001351122.1__CSP(346-365)__Th3R
aucaagcccggcagcgccaacaagccgaaggacgagcuggacuacgccaacgacaucgag

SEQ ID NO: 10102 - RNA, 90 nt, Artificial Sequence
  derived and/or modified CDS sequence (opt1) from Pf(3D7)__XP_001351122.1__CSP(346-375)__Th3R_CS.T3
aucaagcccggcagcgccaacaagccgaaggacgagcuggacuacgccaacgacaucgagaagaagaucugcaagauggagaagugcucc

SEQ ID NO: 10103 - RNA, 156 nt, Artificial Sequence
  derived and/or modified CDS sequence (opt1) from Pf(3D7)__XP_001351122.1__CSP(346-397)
aucaagcccggcagcgccaacaagccgaaggacgagcuggacuacgccaacgacaucgagaagaagaucugcaagauggagaagugcuccagcguguucaacgucgugaacuccagcaucgggcucaucauggugcuguccuuccuguuccucaac

SEQ ID NO: 10104 - RNA, 876 nt, Artificial Sequence
  derived and/or modified CDS sequence (opt2) from Pf(3D7)__XP_001351122.1__CSP(93-384)
aagcucaagcagcccgccgacggcaaccccgaccccaacgccaaccccaacgucgaccccaacgccaaccccaacgucgaccccaacgccaaccccaacgucgaccccaacgccaaccccaacgccaaccccaacgccaaccccaacgccaaccccaacgccaaccccaacgccaaccccaacgccaaccccaacgccaaccccaacgccaaccccaacgccaaccccaacgccaaccccaacgccaaccccaacgccaaccccaacgccaaccccaacgccaaccccaacgccaaccccaacgccaaccccaacgucgaccccaacgccaaccccaacgccaaccccaacgccaaccccaacgccaaccccaacgccaaccccaacgccaaccccaacgccaaccccaacgccaaccccaacgccaaccccaacgccaaccccaacgccaaccccaacgccaaccccaacgccaaccccaacgccaaccccaacgccaaccccaacgccaaccccaacgccaaccccaacgccaaccccaacaagaacaaccagggcaacggccagggccacaacaugcccaacgaccccaaccgcaacgucgacgagaacgccaacgccaacuccgccgucaagaacaacaacaacgaggagcccuccgacaagcacaucaaggaguaccucaacaagauccagaacucccucuccaccgaguggucccccugcuccgucaccugcggcaacggcauccagguccgcaucaagcccggcuccgccaacaagcccaaggacgagcucgacuacgccaacgacaucgagaagaagaucugcaagauggagaagugcuccuccgucuucaacgucgucaacuccucc

SEQ ID NO: 10105 - RNA, 402 nt, Artificial Sequence
  derived and/or modified CDS sequence (opt2) from Pf(3D7)__XP_001351122.1__CSP(19-152)
cucuuccaggaguaccagugcuacggcuccuccuccaacacccgcguccucaacgagcucaacuacgacaacgccggcaccaaccucuacaacgagcucgagaugaacuacuacggcaagcaggagaacugguacucccucaagaagaacucccgcucccucggcgagaacgacgacggcaacaacgaggacaacgagaagcuccgcaagcccaagcacaagaagcucaagcagcccgccgacggcaaccccgaccccaacgccaaccccaacgucgaccccaacgccaaccccaacgucgaccccaacgccaaccccaacgucgaccccaacgccaaccccaacgccaaccccaacgccaaccccaacgccaaccccaacgccaaccccaacgccaacccc

SEQ ID NO: 10106 - RNA, 522 nt, Artificial Sequence
  derived and/or modified CDS sequence (opt2) from Pf(3D7)__XP_001351122.1__CSP(19-192)
cucuuccaggaguaccagugcuacggcuccuccuccaacacccgcguccucaacgagcucaacuacgacaacgccggcaccaaccucuacaacgagcucgagaugaacuacuacggcaagcaggagaacugguacucccucaagaagaacucccgcucccucggcgagaacgacgacggcaacaacgaggacaacgagaagcuccgcaagcccaagcacaagaagcucaagcagcccgccgacggcaaccccgaccccaacgccaaccccaacgucgaccccaacgccaaccccaacgucgaccccaacgccaaccccaacgucgaccccaacgccaaccccaacgccaaccccaacgccaaccccaacgccaaccccaacgccaaccccaacgccaaccccaacgccaaccccaacgccaaccccaacgccaaccccaacgccaaccccaacgccaaccccaacgccaaccccaacgccaaccccaacgccaaccccaacgccaaccccaacgccaacccc

SEQ ID NO: 10107 - RNA, 60 nt, Artificial Sequence
  derived and/or modified CDS sequence (opt2) from Pf(3D7)__XP_001351122.1__CSP(346-365)__Th3R
aucaagcccggcuccgccaacaagcccaaggacgagcucgacuacgccaacgacaucgag

SEQ ID NO: 10108 - RNA, 90 nt, Artificial Sequence
  derived and/or modified CDS sequence (opt2) from Pf(3D7)__XP_001351122.1__CSP(346-375)__Th3R_CS.T3
aucaagcccggcuccgccaacaagcccaaggacgagcucgacuacgccaacgacaucgagaagaagaucugcaagauggagaagugcucc

SEQ ID NO: 10109 - RNA, 156 nt, Artificial Sequence
  derived and/or modified CDS sequence (opt2) from Pf(3D7)__XP_001351122.1__CSP(346-397)
aucaagcccggcuccgccaacaagcccaaggacgagcucgacuacgccaacgacaucgagaagaagaucugcaagauggagaagugcuccuccgucuucaacgucgucaacuccuccaucggccucaucaugguccucuccuuccucuuccucaac

SEQ ID NO: 10110 - RNA, 876 nt, Artificial Sequence
  derived and/or modified CDS sequence (opt3) from Pf(3D7)__XP_001351122.1__CSP(93-384)
aagcugaaacagcccgccgacggcaacccugauccaaaugcuaacccgaauguggaccccaacgcaaauccuaacgucgauccaaaugccaaccccaauguugacccuaacgcgaauccaaacgcuaaucccaacgccaauccuaacgcaaacccaaaugccaacccgaaugcuaaccccaaugcaaacccuaaugccaacccaaaugcuaaccccaaugccaacccuaaugcgaacccaaaugcaaaccccaacgccaauccgaacgcuaauccuaacgccaaucccaacgcaaauccaaacgcuaauccuaacguggaucccaaugccaacccaaaugcgaaccccaaugccaacccuaacgcaaauccaaacgcuaauccgaacgccaaucccaacgcuaauccuaacgccaauccaaacgcaaaucccaacgccaauccuaacgcuaauccaaacgcgaaccccaaugcaaacccgaaugccaacccuaaugcuaacccaaaugccaaccccaaugcaaacccuaaugccaaccccaauaagaacaaucaagggaacggacagggucacaauaugccaaacgacccuaacagaaauguagaugagaacgcuaaugccaacagcgcagugaaaaauaacaauaacgaggaacccuccgacaagcauaucaaagaauaccucaauaagauucagaacucucuuucaaccgaguggaguccaugcagcgucacauguggcaaugggauacaggugaggaucaagccgggauccgcgaacaaaccuaaggaugaacuggacuaugcuaaugauauugagaaaaagaucugcaaaauggagaaguguucuucgguuuucaacguggucaauucaagc

SEQ ID NO: 10111 - RNA, 402 nt, Artificial Sequence
  derived and/or modified CDS sequence (opt3) from Pf(3D7)__XP_001351122.1__CSP(19-152)
cuguuccaggaguaccaaugcuauggcagcuccucuaacaccagagugcucaaugaacuuaacuacgacaaugccgggacaaaccuguauaaugaguuggaaaugaacuacuauggaaagcaggagaauugguacucacugaaaaagaacaguaggagcuuaggugaaaaugaugacggcaacaaugaggauaacgagaaacuacggaagcccaaacacaagaagcucaaacagccugcugacgggaauccagauccgaacgcaaaucccaacgucgacccuaacgccaauccaaacguugaucccaaugcgaacccuaauguggacccaaacgcuaaucccaacgccaauccuaacgcaaauccaaacgccaauccgaacgcuaaucccaacgcaaacccu

SEQ ID NO: 10112 - RNA, 522 nt, Artificial Sequence
  derived and/or modified CDS sequence (opt3) from Pf(3D7)__XP_001351122.1__CSP(19-192)
cuguuccaggaguaccaaugcuauggcagcuccucuaacaccagagugcucaaugaacuuaacuacgacaaugccgggacaaaccuguauaaugaguuggaaaugaacuacuauggaaagcaggagaauugguacucacugaaaaagaacaguaggagcuuaggugaaaaugaugacggcaacaaugaggauaacgagaaacuacggaagcccaaacacaagaagcucaaacagccugcugacgggaauccagauccgaacgcaaaucccaacgucgacccuaacgccaauccaaacguugaucccaaugcgaacccuaauguggacccaaacgcuaaucccaacgccaauccuaacgcaaauccaaacgccaauccgaacgcuaaucccaacgcaaacccuaaugccaacccaaaugcuaaccccaaugccaacccuaaugcgaacccaaaugcaaaccccaaugccaacccgaaugcuaacccuaaugccaaccccaacgcaaauccaaacgcuaauccu

SEQ ID NO: 10113 - RNA, 60 nt, Artificial Sequence
  derived and/or modified CDS sequence (opt3) from Pf(3D7)__XP_001351122.1__CSP(346-365)__Th3R
aucaagcccggcagcgccaacaaaccuaaggacgagcuggauuacgcuaaugacauugaa

SEQ ID NO: 10114 - RNA, 90 nt, Artificial Sequence
  derived and/or modified CDS sequence (opt3) from Pf(3D7)__XP_001351122.1__CSP(346-375)__Th3R_CS.T3
aucaagcccggcagcgccaacaaaccuaaggacgagcuggauuacgcuaaugacauugagaaaaagauaugcaaaauggaaaaguguucc

SEQ ID NO: 10115 - RNA, 156 nt, Artificial Sequence
  derived and/or modified CDS sequence (opt3) from Pf(3D7)__XP_001351122.1__CSP(346-397)
aucaagcccggcagcgccaacaaaccuaaggacgagcuggauuacgcuaaugacauugagaaaaagauaugcaaaauggaaaaguguuccucuguguucaacgucguuaauucaaguaucgggcucauuauggugcuuagcuuucuguucuugaac

SEQ ID NO: 10116 - RNA, 876 nt, Artificial Sequence
  derived and/or modified CDS sequence (opt4) from Pf(3D7)__XP_001351122.1__CSP(93-384)
aagcugaagcagcccgccgacggcaaccccgaccccaacgccaaccccaacguggaccccaacgccaaccccaacguggaccccaacgccaaccccaacguggaccccaacgccaaccccaacgccaaccccaacgccaaccccaacgccaaccccaacgccaaccccaacgccaaccccaacgccaaccccaacgccaaccccaacgccaaccccaacgccaaccccaacgccaaccccaacgccaaccccaacgccaaccccaacgccaaccccaacgccaaccccaacgccaaccccaacgccaaccccaacguggaccccaacgccaaccccaacgccaaccccaacgccaaccccaacgccaaccccaacgccaaccccaacgccaaccccaacgccaaccccaacgccaaccccaacgccaaccccaacgccaaccccaacgccaaccccaacgccaaccccaacgccaaccccaacgccaaccccaacgccaaccccaacgccaaccccaacgccaaccccaacgccaaccccaacaagaacaaccagggcaacggccagggccacaacaugcccaacgaccccaacagaaacguggacgagaacgccaacgccaacagcgccgugaagaacaacaacaacgaggagcccagcgacaagcacaucaaggaguaccugaacaagauccagaacagccugagcaccgaguggagccccugcagcgugaccugcggcaacggcauccaggugagaaucaagcccggcagcgccaacaagcccaaggacgagcuggacuacgccaacgacaucgagaagaagaucugcaagauggagaagugcagcagcguguucaacguggugaacagcagc

SEQ ID NO: 10117 - RNA, 402 nt, Artificial Sequence
  derived and/or modified CDS sequence (opt4) from Pf(3D7)__XP_001351122.1__CSP(19-152)
cuguuccaggaguaccagugcuacggcagcagcagcaacaccagagugcugaacgagcugaacuacgacaacgccggcaccaaccuguacaacgagcuggagaugaacuacuacggcaagcaggagaacugguacagccugaagaagaacagcagaagccugggcgagaacgacgacggcaacaacgaggacaacgagaagcugagaaagcccaagcacaagaagcugaagcagcccgccgacggcaaccccgaccccaacgccaaccccaacguggaccccaacgccaaccccaacguggaccccaacgccaaccccaacguggaccccaacgccaaccccaacgccaaccccaacgccaaccccaacgccaaccccaacgccaaccccaacgccaacccc

SEQ ID NO: 10118 - RNA, 522 nt, Artificial Sequence
  derived and/or modified CDS sequence (opt4) from Pf(3D7)__XP_001351122.1__CSP(19-192)
cuguuccaggaguaccagugcuacggcagcagcagcaacaccagagugcugaacgagcugaacuacgacaacgccggcaccaaccuguacaacgagcuggagaugaacuacuacggcaagcaggagaacugguacagccugaagaagaacagcagaagccugggcgagaacgacgacggcaacaacgaggacaacgagaagcugagaaagcccaagcacaagaagcugaagcagcccgccgacggcaaccccgaccccaacgccaaccccaacguggaccccaacgccaaccccaacguggaccccaacgccaaccccaacguggaccccaacgccaaccccaacgccaaccccaacgccaaccccaacgccaaccccaacgccaaccccaacgccaaccccaacgccaaccccaacgccaaccccaacgccaaccccaacgccaaccccaacgccaaccccaacgccaaccccaacgccaaccccaacgccaaccccaacgccaaccccaacgccaacccc

SEQ ID NO: 10119 - RNA, 60 nt, Artificial Sequence
  derived and/or modified CDS sequence (opt4) from Pf(3D7)__XP_001351122.1__CSP(346-365)__Th3R
aucaagcccggcagcgccaacaagcccaaggacgagcuggacuacgccaacgacaucgag

SEQ ID NO: 10120 - RNA, 90 nt, Artificial Sequence
  derived and/or modified CDS sequence (opt4) from Pf(3D7)__XP_001351122.1__CSP(346-375)__Th3R_CS.T3
aucaagcccggcagcgccaacaagcccaaggacgagcuggacuacgccaacgacaucgagaagaagaucugcaagauggagaagugcagc

SEQ ID NO: 10121 - RNA, 156 nt, Artificial Sequence
  derived and/or modified CDS sequence (opt4) from Pf(3D7)__XP_001351122.1__CSP(346-397)
aucaagcccggcagcgccaacaagcccaaggacgagcuggacuacgccaacgacaucgagaagaagaucugcaagauggagaagugcagcagcguguucaacguggugaacagcagcaucggccugaucauggugcugagcuuccuguuccugaac

SEQ ID NO: 10122 - RNA, 876 nt, Artificial Sequence
  derived and/or modified CDS sequence (opt5) from Pf(3D7)__XP_001351122.1__CSP(93-384)
aagcugaaacagcccgccgacggcaacccugauccgaaugcuaaccccaauguggacccuaacgccaaucccaacgucgauccuaaugcgaaccccaauguugacccuaacgcuaauccgaacgccaaucccaacgccaauccuaacgcuaaccccaaugccaacccuaaugcuaaccccaaugccaacccgaaugcgaacccuaaugccaaccccaaugcuaacccuaaugccaaccccaaugcuaaccccaacgccaauccuaacgcgaauccgaacgccaaucccaacgcuaauccuaacgccaaucccaacguggauccuaaugcuaaccccaaugccaacccgaaugccaacccuaacgcuaaucccaacgcgaauccuaacgccaaucccaacgcuaauccuaacgccaaucccaacgccaauccgaacgcuaauccuaacgccaaucccaacgcgaaccccaaugcuaacccuaaugccaacccgaaugccaaccccaaugcuaacccuaaugccaaccccaaugcuaacccuaauaagaacaaucaagggaacggacagggccacaauaugcccaacgacccuaacagaaauguggaugagaacgccaaugcgaacagcgccgucaaaaauaacaauaacgaggaacccuccgacaagcauaucaaagaauaccucaauaagauucagaacucucugagcaccgagugguccccgugcucugugacaugugggaauggaauccagguucggauuaagccuggcagcgcuaacaaacccaaggaugaacuugacuaugccaaugauaucgagaaaaagauuugcaaaauggagaaguguuccucuguguucaacgucgugaauagcucc

SEQ ID NO: 10123 - RNA, 402 nt, Artificial Sequence
  derived and/or modified CDS sequence (opt5) from Pf(3D7)__XP_001351122.1__CSP(19-152)
cuguuccaggaguaccaaugcuauggcagcuccucuaacaccagagugcucaaugaacugaacuacgacaaugccgggacaaaccuuuauaaugagcuggaaaugaacuacuauggaaagcaggagaauugguacagccucaaaaagaacucccggucucugggcgaaaaugaugacgggaacaaugaggauaacgagaaacuucgcaagcccaaacacaagaagcugaaacagccugcugacggaaauccggaucccaacgccaauccuaacgucgaccccaacgcgaauccuaacguugaucccaaugcuaacccuaauguggacccgaacgccaaucccaacgccaauccuaacgcuaaucccaacgccaauccuaacgcuaaucccaacgccaacccg

SEQ ID NO: 10124 - RNA, 522 nt, Artificial Sequence
  derived and/or modified CDS sequence (opt5) from Pf(3D7)__XP_001351122.1__CSP(19-192)
cuguuccaggaguaccaaugcuauggcagcuccucuaacaccagagugcucaaugaacugaacuacgacaaugccgggacaaaccuuuauaaugagcuggaaaugaacuacuauggaaagcaggagaauugguacagccucaaaaagaacucccggucucugggcgaaaaugaugacgggaacaaugaggauaacgagaaacuucgcaagcccaaacacaagaagcugaaacagccugcugacggaaauccggaucccaacgccaauccuaacgucgaccccaacgcgaauccuaacguugaucccaaugcuaacccuaauguggacccgaacgccaaucccaacgccaauccuaacgcuaaucccaacgccaauccuaacgcuaaucccaacgccaacccgaaugcgaacccuaaugccaaccccaaugcuaacccuaaugccaaccccaaugcuaaccccaaugccaacccuaaugcgaacccgaaugccaaccccaacgcuaauccuaacgccaauccc

SEQ ID NO: 10125 - RNA, 60 nt, Artificial Sequence; identical to SEQ ID NO: 10113
  derived and/or modified CDS sequence (opt5) from Pf(3D7)__XP_001351122.1__CSP(346-365)__Th3R

SEQ ID NO: 10126 - RNA, 90 nt, Artificial Sequence
  derived and/or modified CDS sequence (opt5) from Pf(3D7)__XP_001351122.1__CSP(346-375)__Th3R_CS.T3
aucaagcccggcagcgccaacaaaccuaaggacgagcuggauuacgcuaaugacauugagaaaaagaucugcaaaauggaaaaguguucc

SEQ ID NO: 10127 - RNA, 156 nt, Artificial Sequence
  derived and/or modified CDS sequence (opt5) from Pf(3D7)__XP_001351122.1__CSP(346-397)
aucaagcccggcagcgccaacaaaccuaaggacgagcuggauuacgcuaaugacauugagaaaaagaucugcaaaauggaaaaguguuccucuguguucaacgucguuaauagcuccauugggcucaucauggugcugucuuuucuuuuccugaac

SEQ ID NO: 10128 - RNA, 876 nt, Artificial Sequence
  derived and/or modified CDS sequence (opt6) from Pf(3D7)__XP_001351122.1__CSP(93-384)
aaacuaaaacaaccagcagacggaaacccagacccaaacgcaaacccaaacguagacccaaacgcaaacccaaacguagauccaaacgcaaacccaaacguagacccaaacgcaaacccaaacgcaaacccaaacgcaaauccaaacgcaaacccaaacgcaaauccaaacgcaaacccaaacgcaaacccaaacgcaaauccaaacgcaaacccaaacgcaaaccccaacgcaaacccaaacgcaaacccuaacgcaaauccaaacgcaaacccaaacgcaaacccaaaugcaaacccaaacgcaaacccaaacguagacccaaacgcaaacccaaacgccaauccaaacgcaaacccaaacgcaaacccaaacgcaaacccaaacgcaaacccaaacgcaaaccccaacgccaacccaaacgccaacccuaacgcaaacccaaacgcaaacccaaacgcaaacccaaacgcaaauccaaacgcaaacccaaacgcaaacccaaacgcaaacccaaacgcaaacccaaaugcaaaccccaacaaaaacaaucaaggaaacggacaaggacacaacaugccaaacgacccaaacagaaacgucgacgaaaacgcuaacgcaaacucagcaguaaaaaacaacaacaacgaagaaccuucagacaaacacauaaaagaauaccuaaacaaaauacaaaacucacucucaacagaauggucacccugcagcguaacaugcgguaacggaauacaaguacgaauaaaaccaggcucagccaacaaaccaaaagacgaacuagacuacgccaacgacauagaaaaaaaaauaugcaaaauggaaaaaugcucaucagucuucaacguaguaaacuccuca

SEQ ID NO: 10129 - RNA, 402 nt, Artificial Sequence
  derived and/or modified CDS sequence (opt6) from Pf(3D7)__XP_001351122.1__CSP(19-152)
cuauuccaagaauaccaaugcuacggaucaagcucaaacacaagaguacuaaacgaacuaaacuacgacaacgcaggaacaaaccuauacaacgaacuagaaaugaacuacuacggaaaacaagaaaacugguacucacuaaaaaaaaacucaagaagccuaggagaaaacgacgacggaaacaacgaagacaacgaaaaacuaagaaaacccaaacacaaaaaacuaaaacaaccagcagacggaaacccagacccaaacgcaaacccaaacguagacccaaacgcaaacccaaacguagacccaaacgcaaacccaaacguagacccaaacgcaaacccaaacgcaaacccaaacgcaaacccaaacgcaaacccaaacgcaaacccaaacgcaaaccca

SEQ ID NO: 10130 - RNA, 522 nt, Artificial Sequence
  derived and/or modified CDS sequence (opt6) from Pf(3D7)__XP_001351122.1__CSP(19-192)
cuauuccaagaauaccaaugcuacggaucaagcucaaacacaagaguacuaaacgaacuaaacuacgacaacgcaggaacaaaccucuacaacgaacuagaaaugaacuacuacggaaaacaagaaaacugguauucacuaaaaaaaaacagcagaagccuaggagaaaacgacgacggaaacaacgaagacaacgaaaaacuaagaaaaccaaaacacaaaaaacuaaaacaaccagcagacggaaacccagacccaaacgcaaacccaaacguagacccaaacgcaaacccaaacguagacccaaacgcaaacccaaacguagacccaaacgcaaacccaaacgcaaacccaaacgcaaacccaaacgcaaacccaaacgcaaauccaaacgcaaacccaaacgcaaacccaaacgcaaauccaaacgcaaauccaaacgcaaacccaaacgcaaacccaaacgcaaacccaaacgcaaacccaaacgcaaacccaaacgcaaacccaaacgcaaaccca

SEQ ID NO: 10131 - RNA, 60 nt, Artificial Sequence
  derived and/or modified CDS sequence (opt6) from Pf(3D7)__XP_001351122.1__CSP(346-365)__Th3R
auaaaaccaggaagcgcaaacaaaccaaaagacgaacuagacuacgcaaacgacauagaa

SEQ ID NO: 10132 - RNA, 90 nt, Artificial Sequence
  derived and/or modified CDS sequence (opt6) from Pf(3D7)__XP_001351122.1__CSP(346-375)__Th3R_CS.T3
auaaaaccaggaagcgcaaacaaaccaaaagacgaacuagacuacgcaaacgacauagaaaaaaaaauaugcaaaauggaaaaaugcuca

SEQ ID NO: 10133 - RNA, 156 nt, Artificial Sequence
  derived and/or modified CDS sequence (opt6) from Pf(3D7)__XP_001351122.1__CSP(346-397)
auaaaaccaggaagcgcaaacaaaccaaaagacgaacuagacuacgcaaacgauauagaaaaaaaaauauguaaaauggaaaaaugcucaagcguauucaauguaguaaacucaagcauaggacuaauaaugguauuaagcuuccuauuucuaaau

SEQ ID NO: 10134 - RNA, 876 nt, Artificial Sequence
  derived and/or modified CDS sequence (opt11) from Pf(3D7)__XP_001351122.1__CSP(93-384)
aaacuaaaacaacccgccgacggcaacccagacccaaaugcgaaccccaacgucgacccaaacgccaaccccaacguagacccaaacgcaaacccaaacguagacccaaacgcaaaccccaacgccaaccccaacgcaaaccccaacgcaaaccccaacgccaacccaaacgccaacccaaacgccaacccaaacgccaacccuaacgccaacccaaacgccaacccaaacgcaaauccgaacgcaaacccaaacgcaaaccccaacgccaaccccaacgcaaacccaaacgcaaacccaaacgcaaacccaaacgucgaccccaacgccaacccgaacgccaacccaaacgcaaacccaaacgcaaaccccaacgcaaacccaaacgcaaacccaaacgccaacccaaacgccaaccccaacgccaacccaaacgcaaacccaaacgccaacccaaacgcaaaccccaacgcaaacccaaacgccaacccaaacgccaacccaaacgccaacccaaacgccaaccccaacgccaacccaaacaaaaacaaccaaggaaacggacaaggccacaacaugccaaacgaccccaaccgcaacguugacgaaaacgccaaugccaacagcgcagucaaaaacaacaacaacgaagaacccuccgacaaacacauaaaagaauaccucaacaaaauccaaaacucacucucaacugaauggucccccugcuccguaaccugcggcaacggcauacaaguccgcauaaaaccaggaucagccaacaaaccaaaagacgaacuagauuacgccaacgacauagaaaaaaaaaucugcaaaauggaaaaaugcuccuccguauucaacguaguaaacuccuca

SEQ ID NO: 10135 - RNA, 402 nt, Artificial Sequence
  derived and/or modified CDS sequence (opt11) from Pf(3D7)__XP_001351122.1__CSP(19-152)
cucuuccaagaauaccaaugcuacggcucaagcuccaacacacgaguccucaacgaacucaacuacgacaacgccggaaccaaccucuacaacgaacucgaaaugaacuacuacggcaaacaagaaaacugguacucacucaaaaaaaacagccgcagccucggcgaaaacgacgacggcaacaacgaagacaacgaaaaacuccgcaaacccaaacacaaaaaacuaaaacaacccgccgacggaaacccagacccaaacgccaacccaaacguagaccccaacgcaaaccccaacgucgaccccaacgcaaacccaaacgucgaccccaacgccaaccccaacgcaaaccccaacgcaaaccccaacgccaacccaaacgccaaccccaacgccaacccc

SEQ ID NO: 10136 - RNA, 522 nt, Artificial Sequence
  derived and/or modified CDS sequence (opt11) from Pf(3D7)__XP_001351122.1__CSP(19-192)
cucuuccaagaauaccaaugcuacggcucaagcuccaacacacgcguacuaaacgaacuaaacuacgacaacgccggaaccaaccuauacaacgaacucgaaaugaacuacuacggcaaacaagaaaacugguacucacucaaaaaaaacagcagaagccuaggcgaaaacgacgacggaaacaacgaagacaacgaaaaacuacgaaaacccaaacacaaaaaacuaaaacaacccgcagacggaaaccccgaccccaacgcaaacccaaacguagacccaaacgcaaacccaaacgucgacccaaacgcaaacccaaacguagacccaaacgcaaacccaaacgcaaaccccaacgcaaacccaaacgcaaacccaaacgcaaaccccaacgcaaacccaaacgcaaacccaaacgccaacccaaacgcaaacccaaacgcaaacccaaacgcaaacccaaacgcaaacccaaacgcaaacccaaacgcaaacccaaacgcaaacccaaacgcaaaccca

SEQ ID NO: 10137 - RNA, 60 nt, Artificial Sequence
  derived and/or modified CDS sequence (opt11) from Pf(3D7)__XP_001351122.1__CSP(346-365)__Th3R
aucaagcccgggagcgcgaacaagcccaaggacgagcucgauuacgcgaacgauaucgag

SEQ ID NO: 10138 - RNA, 90 nt, Artificial Sequence
  derived and/or modified CDS sequence (opt11) from Pf(3D7)__XP_001351122.1__CSP(346-375)__Th3R_CS.T3
aucaagcccgggagcgcgaacaagcccaaggacgagcucgauuacgcgaacgauaucgagaaaaagaucuguaaaauggaaaagugcucg

SEQ ID NO: 10139 - RNA, 156 nt, Artificial Sequence
  derived and/or modified CDS sequence (opt11) from Pf(3D7)__XP_001351122.1__CSP(346-397)
aucaagcccgggagcgcgaacaagcccaaggacgagcucgauuacgcgaacgauaucgagaaaaagaucuguaaaauggaaaagugcucgagcguguucaaugucgugaacucgagcauaggcuugaucauggucuugagcuuucucuuucucaau

SEQ ID NO: 10140 - RNA, 54 nt, Artificial Sequence
  derived and/or modified CDS sequence (opt1) from Homo sapiens__NP_000468.1__signal peptide_HsALB
augaagugggugaccuucaucagccuccuguuccuguucuccagcgccuacucc

SEQ ID NO: 10141 - protein, 3 aa, Artificial Sequence
  derived and/or modified protein sequence (artificial) from Artificial____L(SGG)
SGG

SEQ ID NO: 10142 - RNA, 9 nt, Artificial Sequence
  derived and/or modified CDS sequence (artificial) from Artificial____L(SGG)
agcggcggg

SEQ ID NO: 10143 - RNA, 9 nt, Artificial Sequence
  derived and/or modified CDS sequence (artificial) from Artificial____L(SGG)
uccggcggc

SEQ ID NO: 10144 - RNA, 9 nt, Artificial Sequence
  derived and/or modified CDS sequence (artificial) from Artificial____L(SGG)
agcggcggc

SEQ ID NO: 10145 - RNA, 9 nt, Artificial Sequence
  derived and/or modified CDS sequence (artificial) from Artificial____L(SGG)
aguggaggc

SEQ ID NO: 10146 - RNA, 9 nt, Artificial Sequence
  derived and/or modified CDS sequence (artificial) from Artificial____L(SGG)
agugggggc

SEQ ID NO: 10147 - protein, 15 aa, Artificial Sequence
  derived and/or modified protein sequence (artificial) from Artificial____L(GGS4-GGG)
GGSGGSGGSGGSGGG

SEQ ID NO: 10148 - RNA, 45 nt, Artificial Sequence
  derived and/or modified CDS sequence (artificial) from Artificial____L(GGS4-GGG)
ggcgggagcggcggguccggcgggagcggcggcuccgggggcggg

SEQ ID NO: 10149 - RNA, 45 nt, Artificial Sequence
  derived and/or modified CDS sequence (artificial) from Artificial____L(GGS4-GGG)
ggcggcuccggcggcuccggcggcuccggcggcuccggcggcggc

SEQ ID NO: 10150 - RNA, 45 nt, Artificial Sequence
  derived and/or modified CDS sequence (artificial) from Artificial____L(GGS4-GGG)
ggcggcagcggcggcagcggcggcagcggcggcagcggcggcggc

SEQ ID NO: 10151 - RNA, 45 nt, Artificial Sequence
  derived and/or modified CDS sequence (artificial) from Artificial____L(GGS4-GGG)
ggggggaguggggggaguggggggaguggggggaguggggggggg

SEQ ID NO: 10152 - RNA, 45 nt, Artificial Sequence
  derived and/or modified CDS sequence (artificial) from Artificial____L(GGS4-GGG)
ggcgggagcggagguuccggcgggucuggaggcucagguggggga

SEQ ID NO: 10153 - protein, 154 aa, Artificial Sequence
  derived and/or modified protein sequence (artificial) from Aquifex aeolicus(VF5)____Lumazine Synthase (LumSynt)
MQIYEGKLTAEGLRFGIVASRFNHALVDRLVEGAIDAIVRHGGREEDITLVRVPGSWEIPVAAGELARKEDIDAVIAIGVLIRGATPHFDYIASEVSKGLADLSLELRKPITFGVITADTLEQAIERAGTKHGNKGWEAALSAIEMANLFKSLR

SEQ ID NO: 10154 - RNA, 462 nt, Artificial Sequence
  derived and/or modified CDS sequence (opt1) from Aquifex aeolicus(VF5)____Lumazine Synthase (LumSynt)
augcagaucuacgagggcaagcugaccgccgaggggcuccgcuucggcaucguggccagccgguucaaccacgcgcuggucgaccgccugguggagggggccaucgacgccaucgugcggcacggcgggcgcgaggaggacaucacccucguccgggugcccggcuccugggagaucccgguggccgccggcgagcuggcccgcaaggaggacaucgacgcggucaucgccaucggggugcugauccggggcgccacgccccacuucgacuacaucgccagcgagguguccaaggggcucgcggaccugagccuggagcuccgcaagcccaucaccuucggcgucaucaccgccgacacccuggagcaggccaucgagcgggccgggacgaagcacggcaacaagggcugggaggccgcgcuguccgccaucgagauggccaaccucuucaagagccugcgc

SEQ ID NO: 10155 - RNA, 462 nt, Artificial Sequence
  derived and/or modified CDS sequence (opt1) from Aquifex aeolicus(VF5)____Lumazine Synthase (LumSynt)
augcagaucuacgagggcaagcugaccgccgaggggcuccgcuucggcaucguggccagccgguucaaccacgcgcuggucgaccgccugguggagggggccaucgacgccaucgugcggcacggcgggcgcgaggaggacaucacccucguccgggugcccggcuccugggagaucccgguggccgccggcgagcuggcgcgcaaggaggacaucgacgccgucaucgccaucggggugcugauccggggcgccacgccccacuucgacuacaucgcgagcgagguguccaaggggcucgccgaccugagccuggagcuccgcaagcccaucaccuucggcgucaucaccgccgacacccuggagcaggccaucgagcgggccgggacgaagcacggcaacaagggcugggaggcggcccuguccgccaucgagauggccaaccucuucaagagccugcgc

SEQ ID NO: 10156 - RNA, 462 nt, Artificial Sequence
  derived and/or modified CDS sequence (opt2) from Aquifex aeolicus(VF5)____Lumazine Synthase (LumSynt)
augcagaucuacgagggcaagcucaccgccgagggccuccgcuucggcaucgucgccucccgcuucaaccacgcccucgucgaccgccucgucgagggcgccaucgacgccaucguccgccacggcggccgcgaggaggacaucacccucguccgcguccccggcuccugggagauccccgucgccgccggcgagcucgcccgcaaggaggacaucgacgccgucaucgccaucggcguccucauccgcggcgccaccccccacuucgacuacaucgccuccgaggucuccaagggccucgccgaccucucccucgagcuccgcaagcccaucaccuucggcgucaucaccgccgacacccucgagcaggccaucgagcgcgccggcaccaagcacggcaacaagggcugggaggccgcccucuccgccaucgagauggccaaccucuucaagucccuccgc

SEQ ID NO: 10157 - RNA, 462 nt, Artificial Sequence
  derived and/or modified CDS sequence (opt3) from Aquifex aeolicus(VF5)____Lumazine Synthase (LumSynt)
augcagaucuacgagggcaagcugaccgccgaagggcucagauucggaauuguggcuagcagguuuaaccacgcacuugucgaccggcugguugagggugccauagaugcgaucgugcgccauggcgggcgagaagaggacauuacauugguacgugugcccggauccugggaaaucccugucgcugccggcgaguuagcaagaaaagaggauauugacgccgugaucgcuauagguguucugaucaggggagcaacuccacacuucgauuauauugccucugaagugucaaaggggcuagcugaccucagucuggagcuucggaaaccgaucacguuuggcgucauuaccgccgauacacuggaacaagcgaucgagcgcgcaggcacuaagcaugggaauaaaggaugggaggccgcuuugagcgccauagaaauggcaaaccucuucaagucccugaga

SEQ ID NO: 10158 - RNA, 462 nt, Artificial Sequence
  derived and/or modified CDS sequence (opt4) from Aquifex aeolicus(VF5)____Lumazine Synthase (LumSynt)
augcagaucuacgagggcaagcugaccgccgagggccugagauucggcaucguggccagcagauucaaccacgcccugguggacagacugguggagggcgccaucgacgccaucgugagacacggcggcagagaggaggacaucacccuggugagagugcccggcagcugggagauccccguggccgccggcgagcuggccagaaaggaggacaucgacgccgugaucgccaucggcgugcugaucagaggcgccaccccccacuucgacuacaucgccagcgaggugagcaagggccuggccgaccugagccuggagcugagaaagcccaucaccuucggcgugaucaccgccgacacccuggagcaggccaucgagagagccggcaccaagcacggcaacaagggcugggaggccgcccugagcgccaucgagauggccaaccuguucaagagccugaga

SEQ ID NO: 10159 - RNA, 462 nt, Artificial Sequence
  derived and/or modified CDS sequence (opt5) from Aquifex aeolicus(VF5)____Lumazine Synthase (LumSynt)
augcagaucuacgagggcaagcugaccgccgaagggcucagauucggaauuguggcuagccgguuuaaccacgcccuggucgaccgccuuguugagggcgcgaucgaugcuauugugagacaugggggacgggaagaggacaucacacuggugcgcguccccggcuccugggaaauuccuguggccgccggggagcucgcuagaaaagaggauaucgacgccguuaucgcuauuggagugcugauccggggcgccacgccgcacuucgauuauauugcgucugaagucagcaagggccuugccgaccugucccucgagcugcgcaaacccaucaccuuuggggugauuacagcugauacccuggaacaagccaucgagagagcuggaacaaagcauggcaauaaagggugggaggccgcgcucucugccauugaaauggcuaaccuguucaagagccuucgg

SEQ ID NO: 10160 - RNA, 462 nt, Artificial Sequence
  derived and/or modified CDS sequence (opt6) from Aquifex aeolicus(VF5)____Lumazine Synthase (LumSynt)
augcaaauauacgaaggaaaacuaacagcagaaggauuaagauuuggaauaguagcaaguagauuuaaucacgcgcuaguagacagauuaguagaaggagcaauagacgcaaucguaagacauggcggaagagaagaagauauaacauuaguaagaguaccaggaagcugggaaauaccaguagcagcaggagaacuagcaagaaaagaagauauagaugcaguaauagcaauaggaguacuaauaagaggagcaacaccacacuuugacuauauagcaagcgaaguaaguaaaggacuagcagaccuaagucuagaauuaagaaaaccaauaacauuuggaguaauaacagcagauacauuggaacaagcaauagaaagagcaggaacaaaacacggaaacaaaggaugggaagcagcauuaagcgcaauagaaauggcaaauuuauucaaaaguuuacga

SEQ ID NO: 10161 - RNA, 462 nt, Artificial Sequence
  derived and/or modified CDS sequence (op11) from Aquifex aeolicus(VF5)____Lumazine Synthase (LumSynt)
augcaaauauacgagggcaagcuaacggccgagggcuugcgcuuuggcauagucgcgagcagguucaaucacgcgcucguggacaggcuaguggaaggggccauagacgcgaucgugcgccauggcgggcgcgaggaagauaucacgcucgugcgcgugcccgggagcugggaaauacccguggccgcgggcgagcucgcgcgcaaggaagauaucgacgccgugaucgcgaucggggucuugaucagaggcgcgaccccgcacuuugacuauauagcgagcgaggucucgaaagggcucgcggacuugagcuuggaauugcgcaagccaauaaccuucggcgugaucacggccgauaccuuggaacaggccauagaaagggccgggaccaagcacgggaacaagggcugggaagcggccuugagcgcgaucgagauggcgaaccuguucaagagcuugaga

SEQ ID NO: 10162 - protein, 166 aa, Artificial Sequence
  derived and/or modified protein sequence (wt) from Helicobacter pylori(J99)__AAD06160.1__Ferritin
LSKDIIKLLNEQVNKEMNSSNLYMSMSSWCYTHSLDGAGLFLFDHAAEEYEHAKKLIIFLNENNVPVQLTSISAPEHKFEGLTQIFQKAYEHEQHISESINNIVDHAIKSKDHATFNFLQWYVAEQHEEEVLFKDILDKIELIGNENHGLYLADQYVKGIAKSRKS

SEQ ID NO: 10163 - RNA, 498 nt, Artificial Sequence
  derived and/or modified CDS sequence (wt) from Helicobacter pylori(J99)__AAD06160.1__Ferritin
uuaucaaaagacaucauuaaguugcuaaacgaacaagugaauaaggaaaugaacucuuccaacuuguauaugagcaugaguucauggugcuauacccauagcuuagauggcgcggggcuuuucuuguuugaccaugcggcugaagaauacgagcaugcuaaaaagcuuauuaucuucuugaaugaaaacaaugugccugugcaauugaccagcaucagcgcgccugagcauaaguuugaagguuugacucaaauuuuccaaaaagccuaugaacaugagcaacacaucagcgagucuauuaacaauaucguagaucacgccauaaaaagcaaagaucaugcgacuuucaauuucuugcaaugguauguggcugaacagcaugaagaagaagugcuuuucaaggauauuuuggauaaaauugaguugauugguaaugaaaaccauggcuuguauuuagccgaucaguaugucaaagggaucgcuaaaagcaggaaaucu

SEQ ID NO: 10164 - RNA, 498 nt, Artificial Sequence
  derived and/or modified CDS sequence (opt1) from Helicobacter pylori(J99)__AAD06160.1__Ferritin
cugagcaaggacaucaucaagcuccugaacgagcaggugaacaaggagaugaacuccagcaaccuguacauguccaugagcuccuggugcuacacccacagccucgacggcgccgggcuguuccuguucgaccacgccgcggaggaguacgagcacgccaagaagcucaucaucuuccugaacgagaacaacguccccgugcagcugaccuccaucagcgccccggagcacaaguucgagggccucacgcagaucuuccagaaggccuacgagcacgagcagcacaucuccgagagcaucaacaacaucguggaccacgccaucaaguccaaggaccacgcgaccuucaacuuccugcagugguacgucgccgagcagcacgaggaggaggugcuguucaaggacauccucgacaagaucgagcugaucgggaacgagaaccacggccuguaccucgccgaccaguacgugaaggggaucgccaagagccgcaagucc

SEQ ID NO: 10165 - RNA, 498 nt, Artificial Sequence
  derived and/or modified CDS sequence (opt1) from Helicobacter pylori(J99)__AAD06160.1__Ferritin
cugagcaaggacaucaucaagcuccugaacgagcaggucaacaaggagaugaacuccagcaaccuguacauguccaugagcuccuggugcuacacccacagccucgacggcgccgggcuguuccuguucgaccacgccgcggaggaguacgagcacgccaagaagcucaucaucuuccugaacgagaacaacgugcccgugcagcugaccuccaucagcgccccggagcacaaguucgagggccucacgcagaucuuccagaaggccuacgagcacgagcagcacaucuccgagagcaucaacaacaucguggaccacgccaucaaguccaaggaccacgcgaccuucaacuuccugcagugguacgucgccgagcagcacgaggaggaggugcuguucaaggacauccucgacaagaucgagcugaucgggaacgagaaccacggccuguaccucgccgaccaguacgugaaggggaucgccaagagccgcaagucc

SEQ ID NO: 10166 - RNA, 498 nt, Artificial Sequence
  derived and/or modified CDS sequence (opt2) from Helicobacter pylori(J99)__AAD06160.1__Ferritin
cucuccaaggacaucaucaagcuccucaacgagcaggucaacaaggagaugaacuccuccaaccucuacauguccauguccuccuggugcuacacccacucccucgacggcgccggccucuuccucuucgaccacgccgccgaggaguacgagcacgccaagaagcucaucaucuuccucaacgagaacaacguccccguccagcucaccuccaucuccgcccccgagcacaaguucgagggccucacccagaucuuccagaaggccuacgagcacgagcagcacaucuccgaguccaucaacaacaucgucgaccacgccaucaaguccaaggaccacgccaccuucaacuuccuccagugguacgucgccgagcagcacgaggaggagguccucuucaaggacauccucgacaagaucgagcucaucggcaacgagaaccacggccucuaccucgccgaccaguacgucaagggcaucgccaagucccgcaagucc

SEQ ID NO: 10167 - RNA, 498 nt, Artificial Sequence
  derived and/or modified CDS sequence (opt3) from Helicobacter pylori(J99)__AAD06160.1__Ferritin
cugagcaaggacaucauuaaacuccuuaacgaacaggugaauaaggagaugaacuccucuaaucuguacaugucaaugaguagcuggugcuauacccacuccuuggauggcgccggguuauuccuguuugaccaugcugcagaggaauacgagcacgccaaaaagcuaauaaucuuccucaacgaaaauaacguccccguucaacugacaucuauuucggcgccugagcauaaauuugagggacuuacucagaucuuccagaaggcuuaugaacacgagcagcauauuucagaaagcaucaauaacauaguggaucacgccaucaagaguaaagaccacgcaacguuuaauuuccugcaaugguacguagccgagcagcaugaggaagagguguuguuuaaggauauucucgacaaaaucgaacugauugguaacgagaaucacggccuguaucucgcugaucaguacgucaaggggaucgcaaaauccagaaagucu

SEQ ID NO: 10168 - RNA, 498 nt, Artificial Sequence
  derived and/or modified CDS sequence (opt4) from Helicobacter pylori(J99)__AAD06160.1__Ferritin
cugagcaaggacaucaucaagcugcugaacgagcaggugaacaaggagaugaacagcagcaaccuguacaugagcaugagcagcuggugcuacacccacagccuggacggcgccggccuguuccuguucgaccacgccgccgaggaguacgagcacgccaagaagcugaucaucuuccugaacgagaacaacgugcccgugcagcugaccagcaucagcgcccccgagcacaaguucgagggccugacccagaucuuccagaaggccuacgagcacgagcagcacaucagcgagagcaucaacaacaucguggaccacgccaucaagagcaaggaccacgccaccuucaacuuccugcagugguacguggccgagcagcacgaggaggaggugcuguucaaggacauccuggacaagaucgagcugaucggcaacgagaaccacggccuguaccuggccgaccaguacgugaagggcaucgccaagagcagaaagagc

SEQ ID NO: 10169 - RNA, 498 nt, Artificial Sequence
  derived and/or modified CDS sequence (opt5) from Helicobacter pylori(J99)__AAD06160.1__Ferritin
cugagcaaggacaucauuaaacuccugaacgaacaggugaauaaggagaugaacuccucuaaucuuuacaugagcauguccucuuggugcuauacccacagccuggauggcgccgggcuuuuccuguuugaccaugcugccgaggaauacgagcacgcgaaaaagcucaucauuuuccugaacgaaaauaacguccccguucaacucacauccaucucugcuccugagcauaaauuugagggacugacgcagauuuuccagaaggccuaugaacacgagcagcauaucagcgaauccaucaauaacauuguggaucacgccaucaagagcaaagaccacgcuaccuuuaauuuccugcaaugguacguggccgagcagcaugaggaagagguccucuuuaaggauauucuggacaaaaucgaacuuauuggcaacgagaaucacgggcuguaucucgcugaucaguacgugaagggaaucgccaaaucuagaaagucc

SEQ ID NO: 10170 - RNA, 498 nt, Artificial Sequence
  derived and/or modified CDS sequence (opt6) from Helicobacter pylori(J99)__AAD06160.1__Ferritin
cuaagcaaagacauaauaaaacuauuaaacgaacaaguaaacaaagaaaugaacucaucaaaccuauacaugucaaugucaucauggugcuacacacacucacuagacggagcaggacuauuccuauucgaccacgcagcagaagaauacgaacacgcaaaaaaacuaauaauauuccuaaacgaaaauaacguaccaguacaacuaacaucaauaucagcaccagaacacaaauucgaaggacuaacacaaauauuccaaaaagcauacgaacacgaacaacacauaucagaaucaauaaacaacauagucgaccacgcaauaaaaucaaaagaccacgccacauucaacuuccuacaaugguacguagcagaacaacacgaagaagaaguacuauucaaagacauacuagacaaaauagaacuaauaggaaacgaaaaccacggccuauaccuagcagaccaauacguaaaaggaauagcaaaaucacgaaaauca

SEQ ID NO: 10171 - RNA, 498 nt, Artificial Sequence
  derived and/or modified CDS sequence (opt11) from Helicobacter pylori(J99)__AAD06160.1__Ferritin
cucuccaaagacaucaucaaacuccucaacgaacaaguaaacaaagaaaugaacuccuccaaccucuacauguccauguccuccuggugcuacacccacagccucgacggcgccggccucuuccucuucgaccacgccgccgaagaauacgaacacgccaaaaaacuaaucaucuuccucaacgaaaacaacguccccguccaacucaccuccaucuccgcccccgaacacaaauucgaaggccucacccaaaucuuccaaaaagccuacgaacacgaacaacacaucucagaauccaucaacaacaucgucgaccacgcaaucaaauccaaagaccacgccaccuucaacuuccuacaaugguacgucgccgaacaacacgaagaagaaguccucuucaaagacauccucgacaaaaucgaacucaucggcaacgaaaaccacggccucuaccucgccgaccaauacgucaaaggcaucgccaaaucccgcaaauca

SEQ ID NO: 10172 - protein, 18 aa, Artificial Sequence
  derived and/or modified protein sequence (artificial) from Artificial____CGH5R4H5GC
CGHHHHHRRRRHHHHHGC

SEQ ID NO: 10173 - RNA, 134 nt, Artificial Sequence
  mRNA 3'-end N6-A64-N5-C30-histoneSL-N5
auuaauaaaaaaaaaaaaaaaaaaaaaaaaaaaaaaaaaaaaaaaaaaaaaaaaaaaaaaaaaaaaaaaaugcaucccccccccccccccccccccccccccccccaaaggcucuuuucagagccaccagaauu

SEQ ID NO: 10174 - RNA, 64 nt, Artificial Sequence
  mRNA 3'-end A64
aaaaaaaaaaaaaaaaaaaaaaaaaaaaaaaaaaaaaaaaaaaaaaaaaaaaaaaaaaaaaaaa

SEQ ID NO: 10175 - RNA, 100 nt, Artificial Sequence
  mRNA 3'-end A100
aaaaaaaaaaaaaaaaaaaaaaaaaaaaaaaaaaaaaaaaaaaaaaaaaaaaaaaaaaaaaaaaaaaaaaaaaaaaaaaaaaaaaaaaaaaaaaaaaaaa

SEQ ID NO: 10176 - RNA, 70 nt, Artificial Sequence
  mRNA 3'-end N6-A64
auuaauaaaaaaaaaaaaaaaaaaaaaaaaaaaaaaaaaaaaaaaaaaaaaaaaaaaaaaaaaaaaaaaa

SEQ ID NO: 10177 - RNA, 70 nt, Artificial Sequence
  mRNA 3'-end N6-A64
agaucuaaaaaaaaaaaaaaaaaaaaaaaaaaaaaaaaaaaaaaaaaaaaaaaaaaaaaaaaaaaaaaaa

SEQ ID NO: 10178 - RNA, 106 nt, Artificial Sequence
  mRNA 3'-end N6-A100
auuaauaaaaaaaaaaaaaaaaaaaaaaaaaaaaaaaaaaaaaaaaaaaaaaaaaaaaaaaaaaaaaaaaaaaaaaaaaaaaaaaaaaaaaaaaaaaaaaaaaaaa

SEQ ID NO: 10179 - RNA, 106 nt, Artificial Sequence
  mRNA 3'-end N6-A100
agaucuaaaaaaaaaaaaaaaaaaaaaaaaaaaaaaaaaaaaaaaaaaaaaaaaaaaaaaaaaaaaaaaaaaaaaaaaaaaaaaaaaaaaaaaaaaaaaaaaaaaa

SEQ ID NO: 10180 - RNA, 69 nt, Artificial Sequence
  mRNA 3'-end A64-N5
aaaaaaaaaaaaaaaaaaaaaaaaaaaaaaaaaaaaaaaaaaaaaaaaaaaaaaaaaaaaaaaagaauu

SEQ ID NO: 10181 - RNA, 105 nt, Artificial Sequence
  mRNA 3'-end A100-N5
aaaaaaaaaaaaaaaaaaaaaaaaaaaaaaaaaaaaaaaaaaaaaaaaaaaaaaaaaaaaaaaaaaaaaaaaaaaaaaaaaaaaaaaaaaaaaaaaaaaagaauu

SEQ ID NO: 10182 - RNA, 75 nt, Artificial Sequence
  mRNA 3'-end N6-A64-N5
auuaauaaaaaaaaaaaaaaaaaaaaaaaaaaaaaaaaaaaaaaaaaaaaaaaaaaaaaaaaaaaaaaaagaauu

SEQ ID NO: 10183 - RNA, 75 nt, Artificial Sequence
  mRNA 3'-end N6-A64-N5
agaucuaaaaaaaaaaaaaaaaaaaaaaaaaaaaaaaaaaaaaaaaaaaaaaaaaaaaaaaaaaaaaaaagaauu

SEQ ID NO: 10184 - RNA, 111 nt, Artificial Sequence
  mRNA 3'-end N6-A100-N5
auuaauaaaaaaaaaaaaaaaaaaaaaaaaaaaaaaaaaaaaaaaaaaaaaaaaaaaaaaaaaaaaaaaaaaaaaaaaaaaaaaaaaaaaaaaaaaaaaaaaaaaagaauu

SEQ ID NO: 10185 - RNA, 111 nt, Artificial Sequence
  mRNA 3'-end N6-A100-N5
agaucuaaaaaaaaaaaaaaaaaaaaaaaaaaaaaaaaaaaaaaaaaaaaaaaaaaaaaaaaaaaaaaaaaaaaaaaaaaaaaaaaaaaaaaaaaaaaaaaaaaaagaauu

SEQ ID NO: 10186 - RNA, 88 nt, Artificial Sequence
  mRNA 3'-end histoneSL-A64
caaaggcucuuuucagagccaccaaaaaaaaaaaaaaaaaaaaaaaaaaaaaaaaaaaaaaaaaaaaaaaaaaaaaaaaaaaaaaaaa

SEQ ID NO: 10187 - RNA, 94 nt, Artificial Sequence
  mRNA 3'-end N6-histoneSL-A64
auuaaucaaaggcucuuuucagagccaccaaaaaaaaaaaaaaaaaaaaaaaaaaaaaaaaaaaaaaaaaaaaaaaaaaaaaaaaaaaaaaaaa

SEQ ID NO: 10188 - RNA, 94 nt, Artificial Sequence
  mRNA 3'-end N6-histoneSL-A64
agaucucaaaggcucuuuucagagccaccaaaaaaaaaaaaaaaaaaaaaaaaaaaaaaaaaaaaaaaaaaaaaaaaaaaaaaaaaaaaaaaaa

SEQ ID NO: 10189 - RNA, 130 nt, Artificial Sequence
  mRNA 3'-end N6-histoneSL-A100
auuaaucaaaggcucuuuucagagccaccaaaaaaaaaaaaaaaaaaaaaaaaaaaaaaaaaaaaaaaaaaaaaaaaaaaaaaaaaaaaaaaaaaaaaaaaaaaaaaaaaaaaaaaaaaaaaaaaaaaaa

SEQ ID NO: 10190 - RNA, 130 nt, Artificial Sequence
  mRNA 3'-end N6-histoneSL-A100
agaucucaaaggcucuuuucagagccaccaaaaaaaaaaaaaaaaaaaaaaaaaaaaaaaaaaaaaaaaaaaaaaaaaaaaaaaaaaaaaaaaaaaaaaaaaaaaaaaaaaaaaaaaaaaaaaaaaaaaa

SEQ ID NO: 10191 - RNA, 93 nt, Artificial Sequence
  mRNA 3'-end histoneSL-A64-N5
caaaggcucuuuucagagccaccaaaaaaaaaaaaaaaaaaaaaaaaaaaaaaaaaaaaaaaaaaaaaaaaaaaaaaaaaaaaaaaaagaauu

SEQ ID NO: 10192 - RNA, 129 nt, Artificial Sequence
  mRNA 3'-end histoneSL-A100-N5
caaaggcucuuuucagagccaccaaaaaaaaaaaaaaaaaaaaaaaaaaaaaaaaaaaaaaaaaaaaaaaaaaaaaaaaaaaaaaaaaaaaaaaaaaaaaaaaaaaaaaaaaaaaaaaaaaaaagaauu

SEQ ID NO: 10193 - RNA, 99 nt, Artificial Sequence
  mRNA 3'-end N6-histoneSL-A64-N5
auuaaucaaaggcucuuuucagagccaccaaaaaaaaaaaaaaaaaaaaaaaaaaaaaaaaaaaaaaaaaaaaaaaaaaaaaaaaaaaaaaaaagaauu

SEQ ID NO: 10194 - RNA, 99 nt, Artificial Sequence
  mRNA 3'-end N6-histoneSL-A64-N5
agaucucaaaggcucuuuucagagccaccaaaaaaaaaaaaaaaaaaaaaaaaaaaaaaaaaaaaaaaaaaaaaaaaaaaaaaaaaaaaaaaaagaauu

SEQ ID NO: 10195 - RNA, 135 nt, Artificial Sequence
  mRNA 3'-end N6-histoneSL-A100-N5
auuaaucaaaggcucuuuucagagccaccaaaaaaaaaaaaaaaaaaaaaaaaaaaaaaaaaaaaaaaaaaaaaaaaaaaaaaaaaaaaaaaaaaaaaaaaaaaaaaaaaaaaaaaaaaaaaaaaaaaaagaauu

SEQ ID NO: 10196 - RNA, 135 nt, Artificial Sequence
  mRNA 3'-end N6-histoneSL-A100-N5
agaucucaaaggcucuuuucagagccaccaaaaaaaaaaaaaaaaaaaaaaaaaaaaaaaaaaaaaaaaaaaaaaaaaaaaaaaaaaaaaaaaaaaaaaaaaaaaaaaaaaaaaaaaaaaaaaaaaaaaagaauu

SEQ ID NO: 10197 - protein, 10 aa, Artificial Sequence
  CSP_peptide_1 (ICS mix)
DYANDIEKKI

SEQ ID NO: 10198 - protein, 9 aa, Artificial Sequence
  CSP_peptide_2 (ICS mix)
VFNVVNSSI

SEQ ID NO: 10199 - protein, 9 aa, Artificial Sequence
  CSP_peptide_3 (ICS mix)
CYGSSSNTR

SEQ ID NO: 10200 - protein, 9 aa, Artificial Sequence
  CSP_peptide_4 (ICS mix)
YGSSSNTRV

SEQ ID NO: 10201 - protein, 9 aa, Artificial Sequence
  CSP_peptide_5 (ICS mix)
NYDNAGTNL

SEQ ID NO: 10202 - protein, 9 aa, Artificial Sequence
  CSP_peptide_6 (ICS mix)
AILSVSSFL

SEQ ID NO: 10203 - protein, 9 aa, Artificial Sequence
  CSP_peptide_7 (ICS mix)
SNTRVLNEL

SEQ ID NO: 10204 - protein, 9 aa, Artificial Sequence
  CSP_peptide_8 (ICS mix)
IMVLSFLFL

SEQ ID NO: 10205 - protein, 9 aa, Artificial Sequence
  CSP_peptide_9 (ICS mix)
LIMVLSFLF

SEQ ID NO: 10206 - protein, 9 aa, Artificial Sequence
  CSP_peptide_10 (ICS mix)
GKQENWYSL

SEQ ID NO: 10207 - protein, 15 aa, Artificial Sequence
  CSP_peptide_11 ((ICS mix)
MMRKLAILSVSSFLF

SEQ ID NO: 10208 - protein, 20 aa, Artificial Sequence
  CSP_peptide_12 (ICS mix)
EYLNKIQNSLSTEWSPCSVT

SEQ ID NO: 10209 - protein, 28 aa, Artificial Sequence
  [NANP]7 peptide (ELISA)
NANPNANPNANPNANPNANPNANPNANP

SEQ ID NO: 10210 - protein, 75 aa, Artificial Sequence
  N-term peptide (ELISA)
YGSSSNTRVLNELNYDNAGTNLYNELEMNYYGKQENWYSLKKNSRSLGENDDGNNEDNEKLRKPKHKKLKQPADG

SEQ ID NO: 10211 - protein, 62 aa, Artificial Sequence
  C-term peptide (ELISA)
SDKHIKEYLNKIQNSLSTEWSPCSVTCGNGIQVRIKPGSANKPKDELDYANDIEKKICKMEK

SEQ ID NO: 10212 - protein, 15 aa, Artificial Sequence
  CSP_peptide_1 (Library)
MMRKLAILSVSSFLF

SEQ ID NO: 10213 - protein, 15 aa, Artificial Sequence
  CSP_peptide_2 (Library)
LAILSVSSFLFVEAL

SEQ ID NO: 10214 - protein, 15 aa, Artificial Sequence
  CSP_peptide_3 (Library)
SVSSFLFVEALFQEY

SEQ ID NO: 10215 - protein, 15 aa, Artificial Sequence
  CSP_peptide_4 (Library)
FLFVEALFQEYQCYG

SEQ ID NO: 10216 - protein, 15 aa, Artificial Sequence
  CSP_peptide_5 (Library)
EALFQEYQCYGSSSN

SEQ ID NO: 10217 - protein, 15 aa, Artificial Sequence
  CSP_peptide_6 (Library)
QEYQCYGSSSNTRVL

SEQ ID NO: 10218 - protein, 15 aa, Artificial Sequence
  CSP_peptide_7 (Library)
CYGSSSNTRVLNELN

SEQ ID NO: 10219 - protein, 15 aa, Artificial Sequence
  CSP_peptide_8 (Library)
SSNTRVLNELNYDNA

SEQ ID NO: 10220 - protein, 15 aa, Artificial Sequence
  CSP_peptide_9 (Library)
RVLNELNYDNAGTNL

SEQ ID NO: 10221 - protein, 15 aa, Artificial Sequence
  CSP_peptide_10 (Library)
ELNYDNAGTNLYNEL

SEQ ID NO: 10222 - protein, 15 aa, Artificial Sequence
  CSP_peptide_11 (Library)
DNAGTNLYNELEMNY

SEQ ID NO: 10223 - protein, 15 aa, Artificial Sequence
  CSP_peptide_12 (Library)
TNLYNELEMNYYGKQ

SEQ ID NO: 10224 - protein, 15 aa, Artificial Sequence
  CSP_peptide_13 (Library)
NELEMNYYGKQENWY

SEQ ID NO: 10225 - protein, 15 aa, Artificial Sequence
  CSP_peptide_14 (Library)
MNYYGKQENWYSLKK

SEQ ID NO: 10226 - protein, 15 aa, Artificial Sequence
  CSP_peptide_15 (Library)
GKQENWYSLKKNSRS

SEQ ID NO: 10227 - protein, 15 aa, Artificial Sequence
  CSP_peptide_16 (Library)
NWYSLKKNSRSLGEN

SEQ ID NO: 10228 - protein, 15 aa, Artificial Sequence
  CSP_peptide_17 (Library)
LKKNSRSLGENDDGN

SEQ ID NO: 10229 - protein, 15 aa, Artificial Sequence
  CSP_peptide_18 (Library)
SRSLGENDDGNNEDN

SEQ ID NO: 10230 - protein, 15 aa, Artificial Sequence
  CSP_peptide_19 (Library)
GENDDGNNEDNEKLR

SEQ ID NO: 10231 - protein, 15 aa, Artificial Sequence
  CSP_peptide_20 (Library)
DGNNEDNEKLRKPKH

SEQ ID NO: 10232 - protein, 15 aa, Artificial Sequence
  CSP_peptide_21 (Library)
EDNEKLRKPKHKKLK

SEQ ID NO: 10233 - protein, 15 aa, Artificial Sequence
  CSP_peptide_22 (Library)
KLRKPKHKKLKQPAD

SEQ ID NO: 10234 - protein, 15 aa, Artificial Sequence
  CSP_peptide_23 (Library)
PKHKKLKQPADGNPD

SEQ ID NO: 10235 - protein, 15 aa, Artificial Sequence
  CSP_peptide_24 (Library)
KLKQPADGNPDPNAN

SEQ ID NO: 10236 - protein, 15 aa, Artificial Sequence
  CSP_peptide_25 (Library)
PADGNPDPNANPNVD

SEQ ID NO: 10237 - protein, 15 aa, Artificial Sequence
  CSP_peptide_26 (Library)
NPDPNANPNVDPNAN

SEQ ID NO: 10238 - protein, 15 aa, Artificial Sequence
  CSP_peptide_27 (Library)
NANPNVDPNANPNVD

SEQ ID NO: 10239 - protein, 15 aa, Artificial Sequence
  CSP_peptide_28 (Library)
NVDPNANPNVDPNAN

SEQ ID NO: 10240 - protein, 15 aa, Artificial Sequence
  CSP_peptide_29 (Library)
NANPNVDPNANPNAN

SEQ ID NO: 10241 - protein, 15 aa, Artificial Sequence
  CSP_peptide_30 (Library)
NVDPNANPNANPNAN

SEQ ID NO: 10242 - protein, 15 aa, Artificial Sequence
  CSP_peptide_31 (Library)
NANPNANPNANPNAN

SEQ ID NO: 10243 - protein, 15 aa, Artificial Sequence
  CSP_peptide_32 (Library)
NANPNANPNANPNVD

SEQ ID NO: 10244 - protein, 15 aa, Artificial Sequence
  CSP_peptide_33 (Library)
NANPNANPNVDPNAN

SEQ ID NO: 10245 - protein, 15 aa, Artificial Sequence
  CSP_peptide_34 (Library)
NANPNANPNANPNKN

SEQ ID NO: 10246 - protein, 15 aa, Artificial Sequence
  CSP_peptide_35 (Library)
NANPNANPNKNNQGN

SEQ ID NO: 10247 - protein, 15 aa, Artificial Sequence
  CSP_peptide_36 (Library)
NANPNKNNQGNGQGH

SEQ ID NO: 10248 - protein, 15 aa, Artificial Sequence
  CSP_peptide_37 (Library)
NKNNQGNGQGHNMPN

SEQ ID NO: 10249 - protein, 15 aa, Artificial Sequence
  CSP_peptide_38 (Library)
QGNGQGHNMPNDPNR

SEQ ID NO: 10250 - protein, 15 aa, Artificial Sequence
  CSP_peptide_39 (Library)
QGHNMPNDPNRNVDE

SEQ ID NO: 10251 - protein, 15 aa, Artificial Sequence
  CSP_peptide_40 (Library)
MPNDPNRNVDENANA

SEQ ID NO: 10252 - protein, 15 aa, Artificial Sequence
  CSP_peptide_41 (Library)
PNRNVDENANANSAV

SEQ ID NO: 10253 - protein, 15 aa, Artificial Sequence
  CSP_peptide_42 (Library)
VDENANANSAVKNNN

SEQ ID NO: 10254 - protein, 15 aa, Artificial Sequence
  CSP_peptide_43 (Library)
ANANSAVKNNNNEEP

SEQ ID NO: 10255 - protein, 15 aa, Artificial Sequence
  CSP_peptide_44 (Library)
SAVKNNNNEEPSDKH

SEQ ID NO: 10256 - protein, 15 aa, Artificial Sequence
  CSP_peptide_45 (Library)
NNNNEEPSDKHIKEY

SEQ ID NO: 10257 - protein, 15 aa, Artificial Sequence
  CSP_peptide_46 (Library)
EEPSDKHIKEYLNKI

SEQ ID NO: 10258 - protein, 15 aa, Artificial Sequence
  CSP_peptide_47 (Library)
DKHIKEYLNKIQNSL

SEQ ID NO: 10259 - protein, 15 aa, Artificial Sequence
  CSP_peptide_48 (Library)
KEYLNKIQNSLSTEW

SEQ ID NO: 10260 - protein, 15 aa, Artificial Sequence
  CSP_peptide_49 (Library)
NKIQNSLSTEWSPCS

SEQ ID NO: 10261 - protein, 15 aa, Artificial Sequence
  CSP_peptide_50 (Library)
NSLSTEWSPCSVTCG

SEQ ID NO: 10262 - protein, 15 aa, Artificial Sequence
  CSP_peptide_51 (Library)
TEWSPCSVTCGNGIQ

SEQ ID NO: 10263 - protein, 15 aa, Artificial Sequence
  CSP_peptide_52 (Library)
PCSVTCGNGIQVRIK

SEQ ID NO: 10264 - protein, 15 aa, Artificial Sequence
  CSP_peptide_53 (Library)
TCGNGIQVRIKPGSA

SEQ ID NO: 10265 - protein, 15 aa, Artificial Sequence
  CSP_peptide_54 (Library)
GIQVRIKPGSANKPK

SEQ ID NO: 10266 - protein, 15 aa, Artificial Sequence
  CSP_peptide_55 (Library)
RIKPGSANKPKDELD

SEQ ID NO: 10267 - protein, 15 aa, Artificial Sequence
  CSP_peptide_56 (Library)
GSANKPKDELDYAND

SEQ ID NO: 10268 - protein, 15 aa, Artificial Sequence
  CSP_peptide_57 (Library)
KPKDELDYANDIEKK

SEQ ID NO: 10269 - protein, 15 aa, Artificial Sequence
  CSP_peptide_58 (Library)
ELDYANDIEKKICKM

SEQ ID NO: 10270 - protein, 15 aa, Artificial Sequence
  CSP_peptide_59 (Library)
ANDIEKKICKMEKCS

SEQ ID NO: 10271 - protein, 15 aa, Artificial Sequence
  CSP_peptide_60 (Library)
EKKICKMEKCSSVFN

SEQ ID NO: 10272 - protein, 15 aa, Artificial Sequence
  CSP_peptide_61 (Library)
CKMEKCSSVFNVVNS

SEQ ID NO: 10273 - protein, 15 aa, Artificial Sequence
  CSP_peptide_62 (Library)
KCSSVFNVVNSSIGL

SEQ ID NO: 10274 - protein, 15 aa, Artificial Sequence
  CSP_peptide_63 (Library)
VFNVVNSSIGLIMVL

SEQ ID NO: 10275 - protein, 15 aa, Artificial Sequence
  CSP_peptide_64 (Library)
VNSSIGLIMVLSFLF

SEQ ID NO: 10276 - protein, 13 aa, Artificial Sequence
  CSP_peptide_65 (Library)
IGLIMVLSFLFLN
